United States Patent Application Publication US 2024/0124889 A1 - sequence listing, part 5

SEQ ID NO: 30536 - RNA, 21 nt, Homo sapiens
gaagugugccguggugugucu

SEQ ID NO: 30537 - RNA, 21 nt, Homo sapiens
aagccugcccggcuccucggg

SEQ ID NO: 30538 - RNA, 20 nt, Homo sapiens
guugugucaguuuaucaaac

SEQ ID NO: 30539 - RNA, 22 nt, Homo sapiens
uggucuaggauuguuggaggag

SEQ ID NO: 30540 - RNA, 22 nt, Homo sapiens
cacacacugcaauuacuuuugc

SEQ ID NO: 30541 - RNA, 25 nt, Homo sapiens
aggggugguguugggacagcuccgu

SEQ ID NO: 30542 - RNA, 21 nt, Homo sapiens
ugagcuaaaugugugcuggga

SEQ ID NO: 30543 - RNA, 23 nt, Homo sapiens
gcgaggaccccucggggucugac

SEQ ID NO: 30544 - RNA, 25 nt, Homo sapiens
gcugggcagggcuucugagcuccuu

SEQ ID NO: 30545 - RNA, 20 nt, Homo sapiens
gggaaaaggaagggggagga

SEQ ID NO: 30546 - RNA, 20 nt, Homo sapiens
gcggaaggcggagcggcgga

SEQ ID NO: 30547 - RNA, 18 nt, Homo sapiens
gugaaggcccggcggaga

SEQ ID NO: 30548 - RNA, 19 nt, Homo sapiens
ugagggagugggugggagg

SEQ ID NO: 30549 - RNA, 19 nt, Homo sapiens
acuggaauuggagucaaaa

SEQ ID NO: 30550 - RNA, 19 nt, Homo sapiens
ugagggaguuggguguaua

SEQ ID NO: 30551 - RNA, 19 nt, Homo sapiens
ugagggaguggauuguaug

SEQ ID NO: 30552 - RNA, 19 nt, Homo sapiens
ggcuggucagaugggagug

SEQ ID NO: 30553 - RNA, 19 nt, Homo sapiens
agcagggcuggggauugca

SEQ ID NO: 30554 - RNA, 19 nt, Homo sapiens
ugagggaggagguugggua

SEQ ID NO: 30555 - RNA, 19 nt, Homo sapiens
ugaggugguaggauguaga

SEQ ID NO: 30556 - RNA, 22 nt, Homo sapiens
uccgagccugggucucccucuu

SEQ ID NO: 30557 - RNA, 22 nt, Homo sapiens
ggggguccccggugcucggauc

SEQ ID NO: 30558 - RNA, 22 nt, Homo sapiens
agucauuggaggguuugagcag

SEQ ID NO: 30559 - RNA, 19 nt, Homo sapiens
cagcaggaggugaggggag

SEQ ID NO: 30560 - RNA, 22 nt, Homo sapiens
acucaaaacccuucagugacuu

SEQ ID NO: 30561 - RNA, 22 nt, Homo sapiens
agacuucccauuugaagguggc

SEQ ID NO: 30562 - RNA, 23 nt, Homo sapiens
aaacucuacuuguccuucugagu

SEQ ID NO: 30563 - RNA, 21 nt, Homo sapiens
ggcuagcaacagcgcuuaccu

SEQ ID NO: 30564 - RNA, 21 nt, Homo sapiens
acagucugcugagguuggagc

SEQ ID NO: 30565 - RNA, 23 nt, Homo sapiens
aucccuugcaggggcuguugggu

SEQ ID NO: 30566 - RNA, 22 nt, Homo sapiens
gugagucucuaagaaaagagga

SEQ ID NO: 30567 - RNA, 21 nt, Homo sapiens
ucuaguaagaguggcagucga

SEQ ID NO: 30568 - RNA, 22 nt, Homo sapiens
augcugacauauuuacuagagg

SEQ ID NO: 30569 - RNA, 22 nt, Homo sapiens
guucucccaacguaagcccagc

SEQ ID NO: 30570 - RNA, 21 nt, Homo sapiens
uggguuuacguugggagaacu

SEQ ID NO: 30571 - RNA, 19 nt, Homo sapiens
gugucugcuuccuguggga

SEQ ID NO: 30572 - RNA, 23 nt, Homo sapiens
cuaauaguaucuaccacaauaaa

SEQ ID NO: 30573 - RNA, 23 nt, Homo sapiens
ugugcuugcucgucccgcccgca

SEQ ID NO: 30574 - RNA, 25 nt, Homo sapiens
agggaucgcgggcggguggcggccu

SEQ ID NO: 30575 - RNA, 21 nt, Homo sapiens
augauccaggaaccugccucu

SEQ ID NO: 30576 - RNA, 19 nt, Homo sapiens
aguguggcuuucuuagagc

SEQ ID NO: 30577 - RNA, 19 nt, Homo sapiens
ucuaggcugguacugcuga

SEQ ID NO: 30578 - RNA, 19 nt, Homo sapiens
aagcagcugccucugaggc

SEQ ID NO: 30579 - RNA, 21 nt, Homo sapiens
guggcugcacucacuuccuuc

SEQ ID NO: 30580 - RNA, 21 nt, Homo sapiens
aggaggcagcgcucucaggac

SEQ ID NO: 30581 - RNA, 21 nt, Homo sapiens
aauggcgccacuaggguugug

SEQ ID NO: 30582 - RNA, 25 nt, Homo sapiens
caacccuaggagagggugccauuca

SEQ ID NO: 30583 - RNA, 22 nt, Homo sapiens
auaauacaugguuaaccucuuu

SEQ ID NO: 30584 - RNA, 21 nt, Homo sapiens
aauauuauacagucaaccucu

SEQ ID NO: 30585 - RNA, 25 nt, Homo sapiens
ggcggagggaaguagguccguuggu

SEQ ID NO: 30586 - RNA, 24 nt, Homo sapiens
ugccugggucucuggccugcgcgu

SEQ ID NO: 30587 - RNA, 22 nt, Homo sapiens
aggcggggcgccgcgggaccgc

SEQ ID NO: 30588 - RNA, 22 nt, Homo sapiens
gguggcccggccgugccugagg

SEQ ID NO: 30589 - RNA, 20 nt, Homo sapiens
accaggaggcugaggccccu

SEQ ID NO: 30590 - RNA, 20 nt, Homo sapiens
gucccugaguguauguggug

SEQ ID NO: 30591 - RNA, 21 nt, Homo sapiens
uccgguucucagggcuccacc

SEQ ID NO: 30592 - RNA, 23 nt, Homo sapiens
aggaagcccuggaggggcuggag

SEQ ID NO: 30593 - RNA, 20 nt, Homo sapiens
cuguaugcccucaccgcuca

SEQ ID NO: 30594 - RNA, 23 nt, Homo sapiens
uggugcggagagggcccacagug

SEQ ID NO: 30595 - RNA, 22 nt, Homo sapiens
caacuagacugugagcuucuag

SEQ ID NO: 30596 - RNA, 23 nt, Homo sapiens
aaggagcuuacaaucuagcuggg

SEQ ID NO: 30597 - RNA, 22 nt, Homo sapiens
gggacccagggagagacguaag

SEQ ID NO: 30598 - RNA, 22 nt, Homo sapiens
gcagagugcaaacaauuuugac

SEQ ID NO: 30599 - RNA, 20 nt, Homo sapiens
cggcucugggucugugggga

SEQ ID NO: 30600 - RNA, 22 nt, Homo sapiens
gcagcagggugaaacugacaca

SEQ ID NO: 30601 - RNA, 21 nt, Homo sapiens
uggaggagaaggaaggugaug

SEQ ID NO: 30602 - RNA, 23 nt, Homo sapiens
ucugcucauaccccaugguuucu

SEQ ID NO: 30603 - RNA, 23 nt, Homo sapiens
ugcaccaugguugucugagcaug

SEQ ID NO: 30604 - RNA, 23 nt, Homo sapiens
cugggaucuccggggucuugguu

SEQ ID NO: 30605 - RNA, 22 nt, Homo sapiens
ugagaccucuggguucugagcu

SEQ ID NO: 30606 - RNA, 23 nt, Homo sapiens
uccaguaccacgugucagggcca

SEQ ID NO: 30607 - RNA, 22 nt, Homo sapiens
ggagacugaugaguucccggga

SEQ ID NO: 30608 - RNA, 21 nt, Homo sapiens
gcaggaacuugugagucuccu

SEQ ID NO: 30609 - RNA, 22 nt, Homo sapiens
cugcccuggcccgagggaccga

SEQ ID NO: 30610 - RNA, 21 nt, Homo sapiens
ccuggaaacacugagguugug

SEQ ID NO: 30611 - RNA, 22 nt, Homo sapiens
uauaccucaguuuuaucaggug

SEQ ID NO: 30612 - RNA, 22 nt, Homo sapiens
uggugguuuacaaaguaauuca

SEQ ID NO: 30613 - RNA, 22 nt, Homo sapiens
uggauuucuuugugaaucacca

SEQ ID NO: 30614 - RNA, 21 nt, Homo sapiens
uccucuucucccuccucccag

SEQ ID NO: 30615 - RNA, 20 nt, Homo sapiens
guagaggagauggcgcaggg

SEQ ID NO: 30616 - RNA, 22 nt, Homo sapiens
gugaacgggcgccaucccgagg

SEQ ID NO: 30617 - RNA, 22 nt, Homo sapiens
gacugacaccucuuugggugaa

SEQ ID NO: 30618 - RNA, 21 nt, Homo sapiens
uacucaaaaagcugucaguca

SEQ ID NO: 30619 - RNA, 21 nt, Homo sapiens
uuaauaucggacaaccauugu

SEQ ID NO: 30620 - RNA, 22 nt, Homo sapiens
auccgcgcucugacucucugcc

SEQ ID NO: 30621 - RNA, 20 nt, Homo sapiens
gugagucaggguggggcugg

SEQ ID NO: 30622 - RNA, 22 nt, Homo sapiens
ugcccuuaaaggugaacccagu

SEQ ID NO: 30623 - RNA, 22 nt, Homo sapiens
ucuucucuguuuuggccaugug

SEQ ID NO: 30624 - RNA, 22 nt, Homo sapiens
aaauuauuguacaucggaugag

SEQ ID NO: 30625 - RNA, 22 nt, Homo sapiens
uucaacggguauuuauugagca

SEQ ID NO: 30626 - RNA, 22 nt, Homo sapiens
cuauacaacuuacuacuuuccc

SEQ ID NO: 30627 - RNA, 22 nt, Homo sapiens
ugagguaguaaguuguauuguu

SEQ ID NO: 30628 - RNA, 19 nt, Homo sapiens
cuccagggacuggaaccgg

SEQ ID NO: 30629 - RNA, 22 nt, Homo sapiens
ucccagcugugcaaccugagca

SEQ ID NO: 30630 - RNA, 22 nt, Homo sapiens
cugccucaguuuccacaccuga

SEQ ID NO: 30631 - RNA, 22 nt, Homo sapiens
ugcaagaguaaucgcgguuuug

SEQ ID NO: 30632 - RNA, 21 nt, Homo sapiens
gcaaaaaccacaauuacuuuu

SEQ ID NO: 30633 - RNA, 21 nt, Homo sapiens
gcaaaagugauugcaguuuuu

SEQ ID NO: 30634 - RNA, 22 nt, Homo sapiens
gcaaaaaccacaaucacuuuug

SEQ ID NO: 30635 - RNA, 22 nt, Homo sapiens
ugugggcaaaacaaacacugcu

SEQ ID NO: 30636 - RNA, 22 nt, Homo sapiens
acugcagugcucuugcgcccga

SEQ ID NO: 30637 - RNA, 21 nt, Homo sapiens
gcaggucaucccaacaagugu

SEQ ID NO: 30638 - RNA, 24 nt, Homo sapiens
ggacaccuggaguggauagcuccu

SEQ ID NO: 30639 - RNA, 23 nt, Homo sapiens
acuguuaccgcaggcugcucugg

SEQ ID NO: 30640 - RNA, 22 nt, Homo sapiens
accaaaggcagcccuggcaacu

SEQ ID NO: 30641 - RNA, 21 nt, Homo sapiens
auacucuagaaagauggucua

SEQ ID NO: 30642 - RNA, 22 nt, Homo sapiens
ggucaacaaucuuucuagagcu

SEQ ID NO: 30643 - RNA, 21 nt, Homo sapiens
ggaggucugcauccuaguccc

SEQ ID NO: 30644 - RNA, 23 nt, Homo sapiens
ucuggggauuugaaugcagaccu

SEQ ID NO: 30645 - RNA, 20 nt, Homo sapiens
agaauggcugugcuguaaug

SEQ ID NO: 30646 - RNA, 21 nt, Homo sapiens
cugcauuacagcacagccaga

SEQ ID NO: 30647 - RNA, 21 nt, Homo sapiens
cuuuggaagagguagaaguca

SEQ ID NO: 30648 - RNA, 22 nt, Homo sapiens
gcugagauauccccuauuccaa

SEQ ID NO: 30649 - RNA, 22 nt, Homo sapiens
gugucuggaaucucugauacga

SEQ ID NO: 30650 - RNA, 23 nt, Homo sapiens
accauauucagugacaucccagu

SEQ ID NO: 30651 - RNA, 22 nt, Homo sapiens
gggaaaaauaggaaggacuuug

SEQ ID NO: 30652 - RNA, 21 nt, Homo sapiens
acaaagucccuccuauucuuc

SEQ ID NO: 30653 - RNA, 22 nt, Homo sapiens
aguucuagaaaugcauggccca

SEQ ID NO: 30654 - RNA, 21 nt, Homo sapiens
ggugggucaugcauuucuaga

SEQ ID NO: 30655 - RNA, 22 nt, Homo sapiens
aaauuagguaguggcaguggaa

SEQ ID NO: 30656 - RNA, 21 nt, Homo sapiens
guuccacugccacuaccuaau

SEQ ID NO: 30657 - RNA, 21 nt, Homo sapiens
cugcaggagacagagucggug

SEQ ID NO: 30658 - RNA, 22 nt, Homo sapiens
gacuccucucucuccccugcug

SEQ ID NO: 30659 - RNA, 22 nt, Homo sapiens
ccuaccauuagaagggcuggaa

SEQ ID NO: 30660 - RNA, 22 nt, Homo sapiens
ucuuccagcucuucuaauggua

SEQ ID NO: 30661 - RNA, 21 nt, Homo sapiens
cuagggacagaugacacuuga

SEQ ID NO: 30662 - RNA, 23 nt, Homo sapiens
agacauguggcgucaaucccaaa

SEQ ID NO: 30663 - RNA, 21 nt, Homo sapiens
cuggaguggaagaacaggcag

SEQ ID NO: 30664 - RNA, 23 nt, Homo sapiens
gccagcugaaaguccacuccaua

SEQ ID NO: 30665 - RNA, 22 nt, Homo sapiens
gcaggcagaagggauggugagg

SEQ ID NO: 30666 - RNA, 23 nt, Homo sapiens
ccugucagccccacuucugccug

SEQ ID NO: 30667 - RNA, 20 nt, Homo sapiens
cugggggguagaugaagaga

SEQ ID NO: 30668 - RNA, 21 nt, Homo sapiens
gaugucuuccacacccuccaa

SEQ ID NO: 30669 - RNA, 22 nt, Homo sapiens
ugcccuggaacggggcuggcag

SEQ ID NO: 30670 - RNA, 23 nt, Homo sapiens
cuaaggcuaaugcuguacuuugu

SEQ ID NO: 30671 - RNA, 23 nt, Homo sapiens
gcauuaaccuuacaaugaccuuu

SEQ ID NO: 30672 - RNA, 22 nt, Homo sapiens
gugaaguagugcauuagccuca

SEQ ID NO: 30673 - RNA, 24 nt, Homo sapiens
acauuaaucuuccugcucucuaua

SEQ ID NO: 30674 - RNA, 23 nt, Homo sapiens
uaagguuaauuacgaugaagcac

SEQ ID NO: 30675 - RNA, 24 nt, Homo sapiens
acacccuggaugcaugcuuuccac

SEQ ID NO: 30676 - RNA, 22 nt, Homo sapiens
gguucccucuccaaaugugucu

SEQ ID NO: 30677 - RNA, 22 nt, Homo sapiens
aggcauaggaugacaaagggaa

SEQ ID NO: 30678 - RNA, 21 nt, Homo sapiens
acgucccuuugccuucccagc

SEQ ID NO: 30679 - RNA, 21 nt, Homo sapiens
ccgugguucuacccuguggua

SEQ ID NO: 30680 - RNA, 22 nt, Homo sapiens
caccacugcacucgcuccagcc

SEQ ID NO: 30681 - RNA, 18 nt, Homo sapiens
ucccacugcagagccugg

SEQ ID NO: 30682 - RNA, 22 nt, Homo sapiens
accacaauaucacaccucccag

SEQ ID NO: 30683 - RNA, 22 nt, Homo sapiens
cgagugugagaucacaccuccc

SEQ ID NO: 30684 - RNA, 22 nt, Homo sapiens
ucccaggaaccaugauaucaca

SEQ ID NO: 30685 - RNA, 22 nt, Homo sapiens
ucccaggaagcacgauaucaca

SEQ ID NO: 30686 - RNA, 18 nt, Homo sapiens
cccuccgggaagcccacc

SEQ ID NO: 30687 - RNA, 18 nt, Homo sapiens
cugcugaguccugcagug

SEQ ID NO: 30688 - RNA, 17 nt, Homo sapiens
ugcagucuccucccuca

SEQ ID NO: 30689 - RNA, 18 nt, Homo sapiens
ccaucuuccuucagccuc

SEQ ID NO: 30690 - RNA, 22 nt, Homo sapiens
cucagcuacagacaucagugac

SEQ ID NO: 30691 - RNA, 22 nt, Homo sapiens
uagcuccuuuccacagacaggu

SEQ ID NO: 30692 - RNA, 22 nt, Homo sapiens
uaguccauuuugaguuaacucu

SEQ ID NO: 30693 - RNA, 22 nt, Homo sapiens
augguccugcugaaucccaaca

SEQ ID NO: 30694 - RNA, 17 nt, Homo sapiens
aaaguacguccaucuuc

SEQ ID NO: 30695 - RNA, 21 nt, Homo sapiens
acucuucagacucuauucaga

SEQ ID NO: 30696 - RNA, 22 nt, Homo sapiens
gcuccauguucccgucuccuug

SEQ ID NO: 30697 - RNA, 20 nt, Homo sapiens
cgccucucagcccagcuuuu

SEQ ID NO: 30698 - RNA, 18 nt, Homo sapiens
cuccgcucacuccagccu

SEQ ID NO: 30699 - RNA, 22 nt, Homo sapiens
accuucuaguuuucagagucgc

SEQ ID NO: 30700 - RNA, 20 nt, Homo sapiens
aggcaucuugcagagucuuu

SEQ ID NO: 30701 - RNA, 21 nt, Homo sapiens
augucccacccccacuccugu

SEQ ID NO: 30702 - RNA, 21 nt, Homo sapiens
acaggaguggggggugggacg

SEQ ID NO: 30703 - RNA, 18 nt, Homo sapiens
uucuacuuuacuucuccu

SEQ ID NO: 30704 - RNA, 22 nt, Homo sapiens
ccucugugugagcucuggccau

SEQ ID NO: 30705 - RNA, 21 nt, Homo sapiens
aaccuuuguacccugagccca

SEQ ID NO: 30706 - RNA, 21 nt, Homo sapiens
acugucuuuucuaagccugug

SEQ ID NO: 30707 - RNA, 22 nt, Homo sapiens
augccuccaagguaucagucac

SEQ ID NO: 30708 - RNA, 22 nt, Homo sapiens
caagccagcaagccccacgaca

SEQ ID NO: 30709 - RNA, 17 nt, Homo sapiens
uacaaucuccucccugu

SEQ ID NO: 30710 - RNA, 17 nt, Homo sapiens
ccucccucuuguccggc

SEQ ID NO: 30711 - RNA, 17 nt, Homo sapiens
aaaacccacgccuccaa

SEQ ID NO: 30712 - RNA, 18 nt, Homo sapiens
cgccucuuccaacucgag

SEQ ID NO: 30713 - RNA, 21 nt, Homo sapiens
uggauuguuucuuuugccgug

SEQ ID NO: 30714 - RNA, 22 nt, Homo sapiens
ugcacggcaaaagaaacaaucu

SEQ ID NO: 30715 - RNA, 17 nt, Homo sapiens
aaacaacagcccccacc

SEQ ID NO: 30716 - RNA, 20 nt, Homo sapiens
uaccccuagaccaaggagcc

SEQ ID NO: 30717 - RNA, 22 nt, Homo sapiens
ugccucgcgcagccccgggacg

SEQ ID NO: 30718 - RNA, 22 nt, Homo sapiens
ucaccacuucuccaaaucccca

SEQ ID NO: 30719 - RNA, 17 nt, Homo sapiens
uguccucagcucuacca

SEQ ID NO: 30720 - RNA, 23 nt, Homo sapiens
aucacuuaaggccaagaauucaa

SEQ ID NO: 30721 - RNA, 20 nt, Homo sapiens
aaccgcuacagaccaagcuc

SEQ ID NO: 30722 - RNA, 20 nt, Homo sapiens
uggugccgugacucggaucc

SEQ ID NO: 30723 - RNA, 17 nt, Homo sapiens
aaaaacacacacacccu

SEQ ID NO: 30724 - RNA, 17 nt, Homo sapiens
aaaaggaagccaccagg

SEQ ID NO: 30725 - RNA, 22 nt, Homo sapiens
uacgccagucaauaccuuguga

SEQ ID NO: 30726 - RNA, 19 nt, Homo sapiens
uucuuccacaccuaccucu

SEQ ID NO: 30727 - RNA, 22 nt, Homo sapiens
cuccaccuccuccgccuccugg

SEQ ID NO: 30728 - RNA, 22 nt, Homo sapiens
aagguaaauucacaaccacuau

SEQ ID NO: 30729 - RNA, 23 nt, Homo sapiens
gccuagcccuacuagucucaauc

SEQ ID NO: 30730 - RNA, 23 nt, Homo sapiens
uucccaagccacccuccguguca

SEQ ID NO: 30731 - RNA, 17 nt, Homo sapiens
ggccccaccccagucuc

SEQ ID NO: 30732 - RNA, 21 nt, Homo sapiens
uauugcaucuauccaaaccuu

SEQ ID NO: 30733 - RNA, 22 nt, Homo sapiens
uccccuggucagacuacuugag

SEQ ID NO: 30734 - RNA, 18 nt, Homo sapiens
ccccgccggcccgcaccc

SEQ ID NO: 30735 - RNA, 18 nt, Homo sapiens
aucucauccuucugcucu

SEQ ID NO: 30736 - RNA, 21 nt, Homo sapiens
ucucggcuuccacguuugcca

SEQ ID NO: 30737 - RNA, 18 nt, Homo sapiens
aaaacaacaccccccacc

SEQ ID NO: 30738 - RNA, 22 nt, Homo sapiens
uacuuguaacggagagcacuag

SEQ ID NO: 30739 - RNA, 22 nt, Homo sapiens
auaaugaaugcuuggucccuug

SEQ ID NO: 30740 - RNA, 22 nt, Homo sapiens
gccugucccuaaauccuuccug

SEQ ID NO: 30741 - RNA, 22 nt, Homo sapiens
gaaucacaaauguccuuaauag

SEQ ID NO: 30742 - RNA, 22 nt, Homo sapiens
aucaaucacaaauguccuuaau

SEQ ID NO: 30743 - RNA, 17 nt, Homo sapiens
cuccucagcucagccuc

SEQ ID NO: 30744 - RNA, 22 nt, Homo sapiens
cugcuccgagcacggccgcgcg

SEQ ID NO: 30745 - RNA, 21 nt, Homo sapiens
uaaaguaacuuccacuuggcu

SEQ ID NO: 30746 - RNA, 17 nt, Homo sapiens
aaccaccagcccacucc

SEQ ID NO: 30747 - RNA, 22 nt, Homo sapiens
gagccccacugagaaauagaaa

SEQ ID NO: 30748 - RNA, 22 nt, Homo sapiens
cauuuccauagcccacuggguu

SEQ ID NO: 30749 - RNA, 17 nt, Homo sapiens
caacaacagaccacccc

SEQ ID NO: 30750 - RNA, 20 nt, Homo sapiens
uggggcuucucccgccuuuu

SEQ ID NO: 30751 - RNA, 20 nt, Homo sapiens
uuaggguaccgcggccguua

SEQ ID NO: 30752 - RNA, 17 nt, Homo sapiens
ugccagccucgcccagc

SEQ ID NO: 30753 - RNA, 19 nt, Homo sapiens
cugcccuucagccagcucu

SEQ ID NO: 30754 - RNA, 18 nt, Homo sapiens
cgccggagcccgcccccu

SEQ ID NO: 30755 - RNA, 22 nt, Homo sapiens
uaugcccaaaucucuuaccaga

SEQ ID NO: 30756 - RNA, 22 nt, Homo sapiens
uuuggucacaccaguccacauu

SEQ ID NO: 30757 - RNA, 17 nt, Homo sapiens
ggcgcgcgcccagcccc

SEQ ID NO: 30758 - RNA, 21 nt, Homo sapiens
acagagauggaaaggccuucu

SEQ ID NO: 30759 - RNA, 22 nt, Homo sapiens
ccucuggucagccacagucugg

SEQ ID NO: 30760 - RNA, 21 nt, Homo sapiens
agcaaaaagccuguuuacauu

SEQ ID NO: 30761 - RNA, 22 nt, Homo sapiens
cccucucagcuucaguuuccuc

SEQ ID NO: 30762 - RNA, 17 nt, Homo sapiens
gcccagccgucccggag

SEQ ID NO: 30763 - RNA, 22 nt, Homo sapiens
cagcacuugcccugccagccca

SEQ ID NO: 30764 - RNA, 17 nt, Homo sapiens
ucccuccucucagucuu

SEQ ID NO: 30765 - RNA, 17 nt, Homo sapiens
aagaaacuacuaccuca

SEQ ID NO: 30766 - RNA, 21 nt, Homo sapiens
ugauucauccgaggucacaua

SEQ ID NO: 30767 - RNA, 22 nt, Homo sapiens
cuucagcaccaucaucaucagc

SEQ ID NO: 30768 - RNA, 22 nt, Homo sapiens
uaaauucuauuuccugcuuaaa

SEQ ID NO: 30769 - RNA, 22 nt, Homo sapiens
cauguucaucucuauugucaca

SEQ ID NO: 30770 - RNA, 18 nt, Homo sapiens
uccgucccagcccagccu

SEQ ID NO: 30771 - RNA, 20 nt, Homo sapiens
uugccucagaccacccauuu

SEQ ID NO: 30772 - RNA, 20 nt, Homo sapiens
cccagcccagcccaacccag

SEQ ID NO: 30773 - RNA, 17 nt, Homo sapiens
cgcgcgcccagccccgc

SEQ ID NO: 30774 - RNA, 22 nt, Homo sapiens
aaaaccuucuauauccuuuagu

SEQ ID NO: 30775 - RNA, 22 nt, Homo sapiens
aaccauacauccuacucccuca

SEQ ID NO: 30776 - RNA, 22 nt, Homo sapiens
agggcaaaugcaacaguucuuc

SEQ ID NO: 30777 - RNA, 22 nt, Homo sapiens
ugggcgauacagugaggcccug

SEQ ID NO: 30778 - RNA, 22 nt, Homo sapiens
augggccuccagccgucagucu

SEQ ID NO: 30779 - RNA, 18 nt, Homo sapiens
uuccccaauccugccugu

SEQ ID NO: 30780 - RNA, 22 nt, Homo sapiens
gggcugccgggaguccaguccu

SEQ ID NO: 30781 - RNA, 17 nt, Homo sapiens
gccccgacccuucuccc

SEQ ID NO: 30782 - RNA, 25 nt, Homo sapiens
cucagcugugaguuucaucauauuu

SEQ ID NO: 30783 - RNA, 26 nt, Homo sapiens
ucucagcacaguuaucaucccugagc

SEQ ID NO: 30784 - RNA, 18 nt, Homo sapiens
cagcccugcgcacugcug

SEQ ID NO: 30785 - RNA, 22 nt, Homo sapiens
cugagcacaggacuuccuuagc

SEQ ID NO: 30786 - RNA, 21 nt, Homo sapiens
accggccuacaggcagaguca

SEQ ID NO: 30787 - RNA, 21 nt, Homo sapiens
acagccgaggcccucucgguc

SEQ ID NO: 30788 - RNA, 21 nt, Homo sapiens
aaccagcaugcacaucccccc

SEQ ID NO: 30789 - RNA, 22 nt, Homo sapiens
acagucaucucuuugcagacca

SEQ ID NO: 30790 - RNA, 22 nt, Homo sapiens
guccagaucauacauauaauga

SEQ ID NO: 30791 - RNA, 18 nt, Homo sapiens
cgcucccguccugcuggg

SEQ ID NO: 30792 - RNA, 17 nt, Homo sapiens
ucagaagccuucuccau

SEQ ID NO: 30793 - RNA, 17 nt, Homo sapiens
cgccgggcuccccgggg

SEQ ID NO: 30794 - RNA, 22 nt, Homo sapiens
agcguccggcaaccuccuucca

SEQ ID NO: 30795 - RNA, 17 nt, Homo sapiens
agaccccuccuccaucc

SEQ ID NO: 30796 - RNA, 17 nt, Homo sapiens
gucccagccagguccac

SEQ ID NO: 30797 - RNA, 21 nt, Homo sapiens
augugguagauauaugcacga

SEQ ID NO: 30798 - RNA, 21 nt, Homo sapiens
aucgugcauauaucuaccaca

SEQ ID NO: 30799 - RNA, 22 nt, Homo sapiens
cagcuaagcucagcucggcuca

SEQ ID NO: 30800 - RNA, 22 nt, Homo sapiens
ucagcccagcucauccaagcuc

SEQ ID NO: 30801 - RNA, 22 nt, Homo sapiens
gcccagcucagcccaguucagc

SEQ ID NO: 30802 - RNA, 21 nt, Homo sapiens
uaaaccuacaggcaggacuaa

SEQ ID NO: 30803 - RNA, 20 nt, Homo sapiens
cccaacccagcccagcccaa

SEQ ID NO: 30804 - RNA, 20 nt, Homo sapiens
caccucucacccccauccua

SEQ ID NO: 30805 - RNA, 22 nt, Homo sapiens
agcaaaauccacaauuacuuuu

SEQ ID NO: 30806 - RNA, 22 nt, Homo sapiens
caaaaguaauugccgguuuuug

SEQ ID NO: 30807 - RNA, 22 nt, Homo sapiens
ugcaaaagucauugucguuuuc

SEQ ID NO: 30808 - RNA, 21 nt, Homo sapiens
ugaaaguaauugcaguuuuug

SEQ ID NO: 30809 - RNA, 21 nt, Homo sapiens
gcagaaaccacaauuaccuuu

SEQ ID NO: 30810 - RNA, 22 nt, Homo sapiens
gcaaaaguaacugcaguuuuug

SEQ ID NO: 30811 - RNA, 20 nt, Homo sapiens
caaacacugcaaucacuuuu

SEQ ID NO: 30812 - RNA, 22 nt, Homo sapiens
gggaaaaacugcaauuaccuuu

SEQ ID NO: 30813 - RNA, 21 nt, Homo sapiens
uaaaaguaauugcaguuuuua

SEQ ID NO: 30814 - RNA, 23 nt, Homo sapiens
caaaaacugcaauuacuuuugca

SEQ ID NO: 30815 - RNA, 21 nt, Homo sapiens
ucaaaaaccgcaguuacuuuu

SEQ ID NO: 30816 - RNA, 22 nt, Homo sapiens
ugguacaaaagucauugccguu

SEQ ID NO: 30817 - RNA, 22 nt, Homo sapiens
acaaaaguaacugcaguuuuug

SEQ ID NO: 30818 - RNA, 22 nt, Homo sapiens
ggcaaaaaccgcaauuacuuuu

SEQ ID NO: 30819 - RNA, 20 nt, Homo sapiens
caaaaaccacaaugccuuuu

SEQ ID NO: 30820 - RNA, 23 nt, Homo sapiens
aggaacagcagcagcccgggccg

SEQ ID NO: 30821 - RNA, 20 nt, Homo sapiens
uucccaugcccuauaccucu

SEQ ID NO: 30822 - RNA, 22 nt, Homo sapiens
caaagaaguauaugcauaggaa

SEQ ID NO: 30823 - RNA, 22 nt, Homo sapiens
aacauggauuuuccucuaugau

SEQ ID NO: 30824 - RNA, 22 nt, Homo sapiens
aaacauagaaggaauauccacg

SEQ ID NO: 30825 - RNA, 22 nt, Homo sapiens
gagauuggccauguaauacuca

SEQ ID NO: 30826 - RNA, 21 nt, Homo sapiens
cgacgcccggcggggcggaag

SEQ ID NO: 30827 - RNA, 22 nt, Homo sapiens
ucaacaucagucugauaagcua

SEQ ID NO: 30828 - RNA, 22 nt, Homo sapiens
uccaggagcucacaaucuagug

SEQ ID NO: 30829 - RNA, 22 nt, Homo sapiens
cucaauagacugugagcuccuu

SEQ ID NO: 30830 - RNA, 22 nt, Homo sapiens
ugacgaugacaacgaugacgua

SEQ ID NO: 30831 - RNA, 22 nt, Homo sapiens
ugugggugugugcaugagcgug

SEQ ID NO: 30832 - RNA, 21 nt, Homo sapiens
acagcccaucgacugguguug

SEQ ID NO: 30833 - RNA, 22 nt, Homo sapiens
gcuggguggagaagguggugaa

SEQ ID NO: 30834 - RNA, 23 nt, Homo sapiens
ccucccacugcccucucuacccg

SEQ ID NO: 30835 - RNA, 18 nt, Homo sapiens
acccagguagcaaggauu

SEQ ID NO: 30836 - RNA, 22 nt, Homo sapiens
aaauaucacacacacuaaauug

SEQ ID NO: 30837 - RNA, 22 nt, Homo sapiens
ugcaacuuaguaaugugcaaua

SEQ ID NO: 30838 - RNA, 22 nt, Homo sapiens
gaaacaaguaaucaagaauagg

SEQ ID NO: 30839 - RNA, 22 nt, Homo sapiens
agccuauccuggauuacuugaa

SEQ ID NO: 30840 - RNA, 23 nt, Homo sapiens
gcgguagcggaagcgguaacugg

SEQ ID NO: 30841 - RNA, 21 nt, Homo sapiens
gaacuucacuccacugaaauc

SEQ ID NO: 30842 - RNA, 22 nt, Homo sapiens
cagacuccgguggaaugaagga

SEQ ID NO: 30843 - RNA, 23 nt, Homo sapiens
uguagucacuagggcaccauuuu

SEQ ID NO: 30844 - RNA, 21 nt, Homo sapiens
aacggaaccacuagugacuug

SEQ ID NO: 30845 - RNA, 22 nt, Homo sapiens
ucagcagcacaguuaauacugg

SEQ ID NO: 30846 - RNA, 23 nt, Homo sapiens
aaaucagaaucacaccuggggga

SEQ ID NO: 30847 - RNA, 22 nt, Homo sapiens
ucgcccucucaacccagcuuuu

SEQ ID NO: 30848 - RNA, 22 nt, Homo sapiens
acccuuaucaguucuccgucca

SEQ ID NO: 30849 - RNA, 22 nt, Homo sapiens
gcacauguucugcggcccacca

SEQ ID NO: 30850 - RNA, 22 nt, Homo sapiens
ugccuggcacauagcaggcacu

SEQ ID NO: 30851 - RNA, 22 nt, Homo sapiens
ugagugcuugcuaggugccaag

SEQ ID NO: 30852 - RNA, 23 nt, Homo sapiens
cuacgcguauucuuaagcaauaa

SEQ ID NO: 30853 - RNA, 22 nt, Homo sapiens
gaucacuuuugugacuaugcaa

SEQ ID NO: 30854 - RNA, 22 nt, Homo sapiens
uuauggcccuucgguaauucac

SEQ ID NO: 30855 - RNA, 22 nt, Homo sapiens
agugaauucuaccagugccaua

SEQ ID NO: 30856 - RNA, 22 nt, Homo sapiens
accuaauauaucaaacauauca

SEQ ID NO: 30857 - RNA, 21 nt, Homo sapiens
aacccaauaucaaacauauca

SEQ ID NO: 30858 - RNA, 18 nt, Homo sapiens
cgccgccccgcaccugcu

SEQ ID NO: 30859 - RNA, 21 nt, Homo sapiens
ucggcaucuacacuugcacug

SEQ ID NO: 30860 - RNA, 22 nt, Homo sapiens
aagauguggaccauauuacaua

SEQ ID NO: 30861 - RNA, 21 nt, Homo sapiens
acaggccaucuguguuauauu

SEQ ID NO: 30862 - RNA, 22 nt, Homo sapiens
gggcggacacgacauucccgau

SEQ ID NO: 30863 - RNA, 23 nt, Homo sapiens
ucaacgggagugaucgugucauu

SEQ ID NO: 30864 - RNA, 22 nt, Homo sapiens
gugauugccacucuccugagua

SEQ ID NO: 30865 - RNA, 23 nt, Homo sapiens
acaacaaaaucacuagucuucca

SEQ ID NO: 30866 - RNA, 22 nt, Homo sapiens
acuuucgguuaucuagcuuuau

SEQ ID NO: 30867 - RNA, 23 nt, Homo sapiens
ucauacagcuagauaaccaaaga

SEQ ID NO: 30868 - RNA, 22 nt, Homo sapiens
ggcucccaagaaccucaccugu

SEQ ID NO: 30869 - RNA, 24 nt, Homo sapiens
ucacagguuaaagggucucaggga

SEQ ID NO: 30870 - RNA, 22 nt, Homo sapiens
uuagguagacugggauuuguug

SEQ ID NO: 30871 - RNA, 22 nt, Homo sapiens
aucaagguccgcugugaacacg

SEQ ID NO: 30872 - RNA, 20 nt, Homo sapiens
ggcauucaccgcgugccuua

SEQ ID NO: 30873 - RNA, 22 nt, Homo sapiens
aaagagguuaaccagguguguu

SEQ ID NO: 30874 - RNA, 22 nt, Homo sapiens
cgaccauggcuguagacuguua

SEQ ID NO: 30875 - RNA, 22 nt, Homo sapiens
aguaacaaucgaaagccacggu

SEQ ID NO: 30876 - RNA, 21 nt, Homo sapiens
ggccgugacuggagacuguua

SEQ ID NO: 30877 - RNA, 23 nt, Homo sapiens
aguaagcagucuagagccaaggu

SEQ ID NO: 30878 - RNA, 23 nt, Homo sapiens
acgggugcgauuucugugugaga

SEQ ID NO: 30879 - RNA, 22 nt, Homo sapiens
gcgcauguucuauggucaacca

SEQ ID NO: 30880 - RNA, 23 nt, Homo sapiens
acaaggaugaaucuuuguuacug

SEQ ID NO: 30881 - RNA, 22 nt, Homo sapiens
cgggacguccagacucaacucu

SEQ ID NO: 30882 - RNA, 22 nt, Homo sapiens
acagauguccagccacaauucu

SEQ ID NO: 30883 - RNA, 21 nt, Homo sapiens
agaauugcguuuggacaauca

SEQ ID NO: 30884 - RNA, 22 nt, Homo sapiens
cgccacggcuccaaucccuaua

SEQ ID NO: 30885 - RNA, 23 nt, Homo sapiens
ucacauaggaauaaaaagccaua

SEQ ID NO: 30886 - RNA, 22 nt, Homo sapiens
cccauggcuuuuagcccuacau

SEQ ID NO: 30887 - RNA, 23 nt, Homo sapiens
ucacauaggaaugaaaagccaua

SEQ ID NO: 30888 - RNA, 22 nt, Homo sapiens
guccacucaacggucgaugguu

SEQ ID NO: 30889 - RNA, 22 nt, Homo sapiens
acucaccgacagguugaauguu

SEQ ID NO: 30890 - RNA, 25 nt, Homo sapiens
cgacguggggcggagcgucuggaag

SEQ ID NO: 30891 - RNA, 24 nt, Homo sapiens
uggaagacuagugauuuuguuguu

SEQ ID NO: 30892 - RNA, 22 nt, Homo sapiens
aacaacaaaucccagucuaccu

SEQ ID NO: 30893 - RNA, 22 nt, Homo sapiens
guggagugugacaaugguguuu

SEQ ID NO: 30894 - RNA, 23 nt, Homo sapiens
ucaaacgccauuaucacacuaaa

SEQ ID NO: 30895 - RNA, 22 nt, Homo sapiens
agaguggcaaagucuuuccaua

SEQ ID NO: 30896 - RNA, 21 nt, Homo sapiens
auauggaaagacuuugccacu

SEQ ID NO: 30897 - RNA, 22 nt, Homo sapiens
aagugggcugggauccgggcug

SEQ ID NO: 30898 - RNA, 20 nt, Homo sapiens
cagagcccgccccaacccac

SEQ ID NO: 30899 - RNA, 23 nt, Homo sapiens
ccggagcagcaggccagcccgaa

SEQ ID NO: 30900 - RNA, 21 nt, Homo sapiens
ucucgguuggccugcugcaca

SEQ ID NO: 30901 - RNA, 22 nt, Homo sapiens
uuguccacuucuuccugcccug

SEQ ID NO: 30902 - RNA, 22 nt, Homo sapiens
ggcagggcaggcagaaguggac

SEQ ID NO: 30903 - RNA, 22 nt, Homo sapiens
accugcguguuuucuguccaaa

SEQ ID NO: 30904 - RNA, 20 nt, Homo sapiens
uuggacagaaaacacgcagg

SEQ ID NO: 30905 - RNA, 22 nt, Homo sapiens
cuagagcagcgagagggcggca

SEQ ID NO: 30906 - RNA, 23 nt, Homo sapiens
uccgccacacccacgcugcccuc

SEQ ID NO: 30907 - RNA, 22 nt, Homo sapiens
ugcauaugccuggcuagcuccu

SEQ ID NO: 30908 - RNA, 20 nt, Homo sapiens
gaggagcuagccaggcauau

SEQ ID NO: 30909 - RNA, 19 nt, Homo sapiens
ccccgggccggucgcgccg

SEQ ID NO: 30910 - RNA, 21 nt, Homo sapiens
uugcggguucugacuucaaga

SEQ ID NO: 30911 - RNA, 22 nt, Homo sapiens
cuaaaggcuuugaacacgaguu

SEQ ID NO: 30912 - RNA, 23 nt, Homo sapiens
cggccggcugagcgguguccagg

SEQ ID NO: 30913 - RNA, 21 nt, Homo sapiens
acuuguccaccgcagccgagu

SEQ ID NO: 30914 - RNA, 20 nt, Homo sapiens
gcaaagcaaggugagaguga

SEQ ID NO: 30915 - RNA, 22 nt, Homo sapiens
ucaaucucagccuacuuagcaa

SEQ ID NO: 30916 - RNA, 22 nt, Homo sapiens
gugggccaggaaacagggggug

SEQ ID NO: 30917 - RNA, 23 nt, Homo sapiens
cccaccagcugcucccuggccca

SEQ ID NO: 30918 - RNA, 24 nt, Homo sapiens
ugaggcaaaaguauggcaugggca

SEQ ID NO: 30919 - RNA, 22 nt, Homo sapiens
agccaccaggggacgaugccau

SEQ ID NO: 30920 - RNA, 22 nt, Homo sapiens
uuagcauuuauggucauguguc

SEQ ID NO: 30921 - RNA, 23 nt, Homo sapiens
cuucugucucuuuucucucucca

SEQ ID NO: 30922 - RNA, 22 nt, Homo sapiens
aaccaggcaagaacuacugucu

SEQ ID NO: 30923 - RNA, 19 nt, Homo sapiens
acaauauuucuugccuggu

SEQ ID NO: 30924 - RNA, 21 nt, Homo sapiens
cugggaagggagagggacaau

SEQ ID NO: 30925 - RNA, 22 nt, Homo sapiens
ucccucagcuccucuucccagu

SEQ ID NO: 30926 - RNA, 23 nt, Homo sapiens
uuccucagcacagcaccaucuuc

SEQ ID NO: 30927 - RNA, 20 nt, Homo sapiens
cucccauuugcagucccaca

SEQ ID NO: 30928 - RNA, 21 nt, Homo sapiens
uggggagaggcaggccucaga

SEQ ID NO: 30929 - RNA, 24 nt, Homo sapiens
cucugagagcccaccccucgccca

SEQ ID NO: 30930 - RNA, 21 nt, Homo sapiens
augucaggccucauucuaccu

SEQ ID NO: 30931 - RNA, 19 nt, Homo sapiens
aagguagaaagaggccuga

SEQ ID NO: 30932 - RNA, 20 nt, Homo sapiens
gcccgaccucacccaccccg

SEQ ID NO: 30933 - RNA, 22 nt, Homo sapiens
ugaggggauggguuaacagaac

SEQ ID NO: 30934 - RNA, 22 nt, Homo sapiens
uaguucuauuaaccaguccccu

SEQ ID NO: 30935 - RNA, 23 nt, Homo sapiens
ucuccaagcaacccuuaacucca

SEQ ID NO: 30936 - RNA, 22 nt, Homo sapiens
gguguuaagccuugcucagaga

SEQ ID NO: 30937 - RNA, 22 nt, Homo sapiens
ccagaugccuccagaucccaca

SEQ ID NO: 30938 - RNA, 21 nt, Homo sapiens
ccccggggaccugacgagggu

SEQ ID NO: 30939 - RNA, 22 nt, Homo sapiens
cgacccucugccauccccggug

SEQ ID NO: 30940 - RNA, 23 nt, Homo sapiens
acaggccuccugcccucagccca

SEQ ID NO: 30941 - RNA, 23 nt, Homo sapiens
augccucagaccacuuccacauu

SEQ ID NO: 30942 - RNA, 23 nt, Homo sapiens
auuccuccaggauccacacucac

SEQ ID NO: 30943 - RNA, 22 nt, Homo sapiens
cguugccaugucuaagaagaaa

SEQ ID NO: 30944 - RNA, 22 nt, Homo sapiens
guuuucuucuuagacauggcag

SEQ ID NO: 30945 - RNA, 22 nt, Homo sapiens
agcugccaugucuaagaagaaa

SEQ ID NO: 30946 - RNA, 19 nt, Homo sapiens
uucuucuuagacauggcaa

SEQ ID NO: 30947 - RNA, 23 nt, Homo sapiens
cuccauuuuccaccagagcugca

SEQ ID NO: 30948 - RNA, 22 nt, Homo sapiens
uggacuagcucuguggauccug

SEQ ID NO: 30949 - RNA, 22 nt, Homo sapiens
gucaggauccacagagcuaguu

SEQ ID NO: 30950 - RNA, 22 nt, Homo sapiens
auuuagccaauuguccaucuuu

SEQ ID NO: 30951 - RNA, 24 nt, Homo sapiens
acugcacguccauggagcucagcu

SEQ ID NO: 30952 - RNA, 22 nt, Homo sapiens
gacggggcucacagaccggaag

SEQ ID NO: 30953 - RNA, 22 nt, Homo sapiens
aacuugcggagugggcacccca

SEQ ID NO: 30954 - RNA, 26 nt, Homo sapiens
ggcgggggcuacgcgccgcggccgag

SEQ ID NO: 30955 - RNA, 23 nt, Homo sapiens
gcucgcgcucacgcgucccccag

SEQ ID NO: 30956 - RNA, 21 nt, Homo sapiens
aaauacaugucagauuguaug

SEQ ID NO: 30957 - RNA, 21 nt, Homo sapiens
ggcauacaaucugacauguau

SEQ ID NO: 30958 - RNA, 21 nt, Homo sapiens
cuguggggacagaaggaggga

SEQ ID NO: 30959 - RNA, 22 nt, Homo sapiens
gguucuccuucugcuccccagu

SEQ ID NO: 30960 - RNA, 23 nt, Homo sapiens
cuggaaaaacaaaaaggauuuuc

SEQ ID NO: 30961 - RNA, 23 nt, Homo sapiens
gacaaauccuuuuuuuuuucccu

SEQ ID NO: 30962 - RNA, 22 nt, Homo sapiens
ccuccuccacuucccggacaca

SEQ ID NO: 30963 - RNA, 22 nt, Homo sapiens
aagcgaccaugauguaacuuca

SEQ ID NO: 30964 - RNA, 22 nt, Homo sapiens
ugaaguuacaucauggucgcuu

SEQ ID NO: 30965 - RNA, 21 nt, Homo sapiens
agaccaaagacuaugcacuaa

SEQ ID NO: 30966 - RNA, 22 nt, Homo sapiens
agauuagcgcacagucuucggu

SEQ ID NO: 30967 - RNA, 21 nt, Homo sapiens
ugccucuguccagcuguguaa

SEQ ID NO: 30968 - RNA, 22 nt, Homo sapiens
uccaguccggcuccugccugga

SEQ ID NO: 30969 - RNA, 21 nt, Homo sapiens
agccgcgcgucccgagcccag

SEQ ID NO: 30970 - RNA, 22 nt, Homo sapiens
ccugcuggucaaucacagcccc

SEQ ID NO: 30971 - RNA, 22 nt, Homo sapiens
aagagccaguggugaaacagug

SEQ ID NO: 30972 - RNA, 21 nt, Homo sapiens
ucacugucucaccacuggcuc

SEQ ID NO: 30973 - RNA, 22 nt, Homo sapiens
ucauaagucugaacaauaccuu

SEQ ID NO: 30974 - RNA, 22 nt, Homo sapiens
agcaaagaaucucuaucacaga

SEQ ID NO: 30975 - RNA, 21 nt, Homo sapiens
uaacaacucuuacaauucaga

SEQ ID NO: 30976 - RNA, 23 nt, Homo sapiens
acaucuaagacugcaagaguucu

SEQ ID NO: 30977 - RNA, 22 nt, Homo sapiens
agauacagccugcauucccguu

SEQ ID NO: 30978 - RNA, 23 nt, Homo sapiens
agaccaggcuccaggaacucaga

SEQ ID NO: 30979 - RNA, 23 nt, Homo sapiens
aucgggcgagcacuggaucucca

SEQ ID NO: 30980 - RNA, 22 nt, Homo sapiens
acgucuccaccgacuugcaaca

SEQ ID NO: 30981 - RNA, 22 nt, Homo sapiens
uauguugcaagucaguagagag

SEQ ID NO: 30982 - RNA, 22 nt, Homo sapiens
cuagccagggcaggaagggaga

SEQ ID NO: 30983 - RNA, 26 nt, Homo sapiens
aaccuugccccacuccaagcccuggg

SEQ ID NO: 30984 - RNA, 23 nt, Homo sapiens
aacaccagaaagcccagcagaua

SEQ ID NO: 30985 - RNA, 21 nt, Homo sapiens
gccugcccccuccaacagcca

SEQ ID NO: 30986 - RNA, 22 nt, Homo sapiens
uuugggugcgggaggagggcug

SEQ ID NO: 30987 - RNA, 22 nt, Homo sapiens
cccagguccucugcugccccua

SEQ ID NO: 30988 - RNA, 22 nt, Homo sapiens
ggcccccaccaugucuccucaa

SEQ ID NO: 30989 - RNA, 21 nt, Homo sapiens
cagaggccucagcugggcugc

SEQ ID NO: 30990 - RNA, 22 nt, Homo sapiens
uucagcccagccucgccugcuc

SEQ ID NO: 30991 - RNA, 23 nt, Homo sapiens
augcacucucaguccguggcugg

SEQ ID NO: 30992 - RNA, 23 nt, Homo sapiens
ccgcagcucauggccuggaggac

SEQ ID NO: 30993 - RNA, 22 nt, Homo sapiens
aucugauacccacacugccuga

SEQ ID NO: 30994 - RNA, 23 nt, Homo sapiens
aaauacugugaauuccacucuca

SEQ ID NO: 30995 - RNA, 23 nt, Homo sapiens
ugugacagugaaauucacaguau

SEQ ID NO: 30996 - RNA, 21 nt, Homo sapiens
agguguuauccuguccauuug

SEQ ID NO: 30997 - RNA, 22 nt, Homo sapiens
gcaaauggauaggauaacaccu

SEQ ID NO: 30998 - RNA, 22 nt, Homo sapiens
gaaggaggcagcggugagauca

SEQ ID NO: 30999 - RNA, 22 nt, Homo sapiens
ccugcucgcccacugccuccug

SEQ ID NO: 31000 - RNA, 22 nt, Homo sapiens
agaugacaguauccgucuugca

SEQ ID NO: 31001 - RNA, 24 nt, Homo sapiens
accaaggggcaggagucacugaca

SEQ ID NO: 31002 - RNA, 22 nt, Homo sapiens
cacgucagugacugcgcccccu

SEQ ID NO: 31003 - RNA, 23 nt, Homo sapiens
uggggucuuccucuacauuuuga

SEQ ID NO: 31004 - RNA, 22 nt, Homo sapiens
ggagaagauugcagaguaaauu

SEQ ID NO: 31005 - RNA, 22 nt, Homo sapiens
ggaacuuacucugcaaucuucu

SEQ ID NO: 31006 - RNA, 26 nt, Homo sapiens
cacuggggugaggagucaguccugug

SEQ ID NO: 31007 - RNA, 22 nt, Homo sapiens
acacacuguccucauccccaga

SEQ ID NO: 31008 - RNA, 20 nt, Homo sapiens
acaccacacccaucacccau

SEQ ID NO: 31009 - RNA, 22 nt, Homo sapiens
aagggguaggugugguggccaa

SEQ ID NO: 31010 - RNA, 22 nt, Homo sapiens
guggcaauacaauacaacuaca

SEQ ID NO: 31011 - RNA, 23 nt, Homo sapiens
acuauauuuguacuguauugcua

SEQ ID NO: 31012 - RNA, 22 nt, Homo sapiens
uagacacuagauaugugacuga

SEQ ID NO: 31013 - RNA, 22 nt, Homo sapiens
aaucacucacaugccuaguguc

SEQ ID NO: 31014 - RNA, 22 nt, Homo sapiens
acagcaauuaccaagugauuga

SEQ ID NO: 31015 - RNA, 25 nt, Homo sapiens
aagcagcgcccacuuccuccccgcu

SEQ ID NO: 31016 - RNA, 22 nt, Homo sapiens
agaaccucggcuggggcgggcu

SEQ ID NO: 31017 - RNA, 23 nt, Homo sapiens
ccagaacccgcccgcgccggggc

SEQ ID NO: 31018 - RNA, 22 nt, Homo sapiens
aucagagagaugccgccuugcu

SEQ ID NO: 31019 - RNA, 21 nt, Homo sapiens
aaggagcaaggcggcaucucu

SEQ ID NO: 31020 - RNA, 23 nt, Homo sapiens
gcuacagagcaccuccucuucaa

SEQ ID NO: 31021 - RNA, 22 nt, Homo sapiens
uuggagagcaagucacuguugu

SEQ ID NO: 31022 - RNA, 18 nt, Homo sapiens
aaccaccugcccucaccc

SEQ ID NO: 31023 - RNA, 18 nt, Homo sapiens
aucaagccagaagacacg

SEQ ID NO: 31024 - RNA, 23 nt, Homo sapiens
cucaugucuucuggccugaugca

SEQ ID NO: 31025 - RNA, 21 nt, Homo sapiens
auacaguacaggucucucauu

SEQ ID NO: 31026 - RNA, 22 nt, Homo sapiens
gaaaugagagaccuguacugga

SEQ ID NO: 31027 - RNA, 22 nt, Homo sapiens
uucucccacugucuggauccca

SEQ ID NO: 31028 - RNA, 22 nt, Homo sapiens
ugggagccugguagugggagaa

SEQ ID NO: 31029 - RNA, 22 nt, Homo sapiens
caacucugaccaccuagguugg

SEQ ID NO: 31030 - RNA, 22 nt, Homo sapiens
aucaaccuaaggggucagaguu

SEQ ID NO: 31031 - RNA, 23 nt, Homo sapiens
auuggcugcaguuaagguggcac

SEQ ID NO: 31032 - RNA, 22 nt, Homo sapiens
ccaccuuaacugcagccaacuu

SEQ ID NO: 31033 - RNA, 22 nt, Homo sapiens
ucuccauguuuccuucccccuu

SEQ ID NO: 31034 - RNA, 22 nt, Homo sapiens
agaagggggaaggaaacaugga

SEQ ID NO: 31035 - RNA, 21 nt, Homo sapiens
aggccacagccacccaugugu

SEQ ID NO: 31036 - RNA, 22 nt, Homo sapiens
acacauggguggcuguggccua

SEQ ID NO: 31037 - RNA, 21 nt, Homo sapiens
ugcuugguuucagguacagcu

SEQ ID NO: 31038 - RNA, 22 nt, Homo sapiens
ccugcauauuauagauuuguga

SEQ ID NO: 31039 - RNA, 21 nt, Homo sapiens
auacuugguacaacuuaagca

SEQ ID NO: 31040 - RNA, 22 nt, Homo sapiens
aaguuauaccaaauaugccagg

SEQ ID NO: 31041 - RNA, 22 nt, Homo sapiens
ccaccgucaccuggagcccuca

SEQ ID NO: 31042 - RNA, 22 nt, Homo sapiens
cugcagggaggugcuggcaggu

SEQ ID NO: 31043 - RNA, 23 nt, Homo sapiens
caaccuggcacagcccuccugcc

SEQ ID NO: 31044 - RNA, 22 nt, Homo sapiens
uuuggggaggagccagagaggg

SEQ ID NO: 31045 - RNA, 24 nt, Homo sapiens
ugcucuuaucucauggcuccccca

SEQ ID NO: 31046 - RNA, 21 nt, Homo sapiens
acuagcugaaccagaagguac

SEQ ID NO: 31047 - RNA, 23 nt, Homo sapiens
cgaagcucacuccugguucaguu

SEQ ID NO: 31048 - RNA, 22 nt, Homo sapiens
cccgacacugacgccuucccca

SEQ ID NO: 31049 - RNA, 21 nt, Homo sapiens
ggugggaaggcugcagggucu

SEQ ID NO: 31050 - RNA, 22 nt, Homo sapiens
ugcggccagagggaaccugggu

SEQ ID NO: 31051 - RNA, 23 nt, Homo sapiens
ccacuccaggcuccucuggcccu

SEQ ID NO: 31052 - RNA, 22 nt, Homo sapiens
gaaucugccagcuucccacuau

SEQ ID NO: 31053 - RNA, 21 nt, Homo sapiens
ccacuguggaagcuggcagau

SEQ ID NO: 31054 - RNA, 25 nt, Homo sapiens
cuggggcaggagggaggucagcaug

SEQ ID NO: 31055 - RNA, 23 nt, Homo sapiens
ugcuugcugccucuccccuccca

SEQ ID NO: 31056 - RNA, 22 nt, Homo sapiens
uagcuucccaacagauaaauga

SEQ ID NO: 31057 - RNA, 23 nt, Homo sapiens
uggcauggaaugggcuccgccag

SEQ ID NO: 31058 - RNA, 22 nt, Homo sapiens
aguguugggggccacuugugug

SEQ ID NO: 31059 - RNA, 22 nt, Homo sapiens
cacacucauguggcccccagca

SEQ ID NO: 31060 - RNA, 21 nt, Homo sapiens
cagaacaggacaggucagggc

SEQ ID NO: 31061 - RNA, 23 nt, Homo sapiens
agcuuccugcucccugcucuaca

SEQ ID NO: 31062 - RNA, 22 nt, Homo sapiens
aucccaaugcuagaccuggugg

SEQ ID NO: 31063 - RNA, 22 nt, Homo sapiens
caccgggucuagcauugggauu

SEQ ID NO: 31064 - RNA, 22 nt, Homo sapiens
cgcccugaccgcagcccgcagc

SEQ ID NO: 31065 - RNA, 21 nt, Homo sapiens
augucuaauuugagcaccuuu

SEQ ID NO: 31066 - RNA, 22 nt, Homo sapiens
uaccgaagguguucaaauuagg

SEQ ID NO: 31067 - RNA, 19 nt, Homo sapiens
cagcccagauaaccugccu

SEQ ID NO: 31068 - RNA, 20 nt, Homo sapiens
cacugucagcauccucgcau

SEQ ID NO: 31069 - RNA, 22 nt, Homo sapiens
uccuccaggcgcuccaguuuca

SEQ ID NO: 31070 - RNA, 22 nt, Homo sapiens
augaaacugaaaacgcgcuggu

SEQ ID NO: 31071 - RNA, 25 nt, Homo sapiens
agggccccuccgcuccuccucccuu

SEQ ID NO: 31072 - RNA, 22 nt, Homo sapiens
gcagggacggauccucucgggc

SEQ ID NO: 31073 - RNA, 22 nt, Homo sapiens
ccugcccgagaggaucaguccu

SEQ ID NO: 31074 - RNA, 23 nt, Homo sapiens
ucuguaaauaucccuuugccuga

SEQ ID NO: 31075 - RNA, 21 nt, Homo sapiens
cuggaccagaaaagacagaaa

SEQ ID NO: 31076 - RNA, 23 nt, Homo sapiens
augccuccugucccauccggcca

SEQ ID NO: 31077 - RNA, 23 nt, Homo sapiens
cauagcgaagucuagucuuuaga

SEQ ID NO: 31078 - RNA, 23 nt, Homo sapiens
gaccgugagacgucgccgggcca

SEQ ID NO: 31079 - RNA, 23 nt, Homo sapiens
cgccgucccgggagccccacuca

SEQ ID NO: 31080 - RNA, 21 nt, Homo sapiens
ucggcccgcaggagcaccgcu

SEQ ID NO: 31081 - RNA, 23 nt, Homo sapiens
ucugcagguucuccugggaccgg

SEQ ID NO: 31082 - RNA, 22 nt, Homo sapiens
cugggaggaaagcccgggccuu

SEQ ID NO: 31083 - RNA, 22 nt, Homo sapiens
cuaagaccaagccuccuucccu

SEQ ID NO: 31084 - RNA, 21 nt, Homo sapiens
agcaaauccuccccaaaccuc

SEQ ID NO: 31085 - RNA, 20 nt, Homo sapiens
cugugggggcaggaggggcg

SEQ ID NO: 31086 - RNA, 22 nt, Homo sapiens
gaugcccuggccuguccccgca

SEQ ID NO: 31087 - RNA, 22 nt, Homo sapiens
cugcgggagggggugggucagg

SEQ ID NO: 31088 - RNA, 22 nt, Homo sapiens
cacucaaccaccuccgcccgag

SEQ ID NO: 31089 - RNA, 24 nt, Homo sapiens
ccuucuagcagcuacggguccucu

SEQ ID NO: 31090 - RNA, 22 nt, Homo sapiens
agcacauccuugagauccacaa

SEQ ID NO: 31091 - RNA, 22 nt, Homo sapiens
acacaaggcuaaagaaagagaa

SEQ ID NO: 31092 - RNA, 22 nt, Homo sapiens
cuguucucuuccuuuggccuug

SEQ ID NO: 31093 - RNA, 23 nt, Homo sapiens
acuccgcuaacccagguccgcau

SEQ ID NO: 31094 - RNA, 22 nt, Homo sapiens
acuuucccuucagagccuggcu

SEQ ID NO: 31095 - RNA, 22 nt, Homo sapiens
aaagccaggcucugaagggaaa

SEQ ID NO: 31096 - RNA, 22 nt, Homo sapiens
auaggaaggcaaccaucucugg

SEQ ID NO: 31097 - RNA, 23 nt, Homo sapiens
agcagagagugagcgccucccug

SEQ ID NO: 31098 - RNA, 22 nt, Homo sapiens
gcgaagccucugugacgucaug

SEQ ID NO: 31099 - RNA, 23 nt, Homo sapiens
acaccgugacgucacagaggccu

SEQ ID NO: 31100 - RNA, 23 nt, Homo sapiens
gaggguggucagcagguggggca

SEQ ID NO: 31101 - RNA, 23 nt, Homo sapiens
cagccccaccggcucccacucac

SEQ ID NO: 31102 - RNA, 21 nt, Homo sapiens
uaauuccaacaucuaguccua

SEQ ID NO: 31103 - RNA, 22 nt, Homo sapiens
gguuuagauugaacaugaauuu

SEQ ID NO: 31104 - RNA, 22 nt, Homo sapiens
cuaacuucauguucaaucuaaa

SEQ ID NO: 31105 - RNA, 21 nt, Homo sapiens
ggacaaagugcgcaugcccuc

SEQ ID NO: 31106 - RNA, 21 nt, Homo sapiens
ggucaggcaugcacaccuugu

SEQ ID NO: 31107 - RNA, 22 nt, Homo sapiens
caccacaaaucuugaucagaag

SEQ ID NO: 31108 - RNA, 21 nt, Homo sapiens
aggcuucugaucaagauuugg

SEQ ID NO: 31109 - RNA, 24 nt, Homo sapiens
cccgcccagcaccagccccugccu

SEQ ID NO: 31110 - RNA, 21 nt, Homo sapiens
agcaggagggcugggcaggcg

SEQ ID NO: 31111 - RNA, 22 nt, Homo sapiens
ccaugggugugaaaggaguuaa

SEQ ID NO: 31112 - RNA, 21 nt, Homo sapiens
agauaacuccuuccacaucca

SEQ ID NO: 31113 - RNA, 22 nt, Homo sapiens
gaacauagcuaucaaucacuca

SEQ ID NO: 31114 - RNA, 21 nt, Homo sapiens
uuccaaaagagcaauugcuau

SEQ ID NO: 31115 - RNA, 21 nt, Homo sapiens
aacaccaacugcucuuucaga

SEQ ID NO: 31116 - RNA, 23 nt, Homo sapiens
ggcggcggccaggagcgcccgcg

SEQ ID NO: 31117 - RNA, 20 nt, Homo sapiens
auucucucuggaucuccugg

SEQ ID NO: 31118 - RNA, 22 nt, Homo sapiens
auccaugggauccagagagaau

SEQ ID NO: 31119 - RNA, 22 nt, Homo sapiens
guaggggagggaggauggcaga

SEQ ID NO: 31120 - RNA, 24 nt, Homo sapiens
cucauaccuucucuccaucccacc

SEQ ID NO: 31121 - RNA, 18 nt, Homo sapiens
agcuacagugucaucuca

SEQ ID NO: 31122 - RNA, 21 nt, Homo sapiens
uaauuguaggucaagucugcu

SEQ ID NO: 31123 - RNA, 22 nt, Homo sapiens
gccuuucuaugcuccuguucug

SEQ ID NO: 31124 - RNA, 22 nt, Homo sapiens
agugaccgaaacaaaaaauuaa

SEQ ID NO: 31125 - RNA, 23 nt, Homo sapiens
augcaguggaccaggauggcaag

SEQ ID NO: 31126 - RNA, 22 nt, Homo sapiens
agcccuugccauccugguccac

SEQ ID NO: 31127 - RNA, 22 nt, Homo sapiens
uacagcauucuagaugagguau

SEQ ID NO: 31128 - RNA, 22 nt, Homo sapiens
uauauauaucucucaucuagaa

SEQ ID NO: 31129 - RNA, 22 nt, Homo sapiens
ucaacucugcaaaggaagaaga

SEQ ID NO: 31130 - RNA, 22 nt, Homo sapiens
ccucuucuuccuuuacagaauu

SEQ ID NO: 31131 - RNA, 22 nt, Homo sapiens
cugcuuuuacuauucccuccua

SEQ ID NO: 31132 - RNA, 22 nt, Homo sapiens
gcuagggaucaggcucaagggu

SEQ ID NO: 31133 - RNA, 22 nt, Homo sapiens
cucuagcgaggauuccaacauu

SEQ ID NO: 31134 - RNA, 21 nt, Homo sapiens
ccaauauuggaauccccgcua

SEQ ID NO: 31135 - RNA, 22 nt, Homo sapiens
guucuagauaugaagacaauca

SEQ ID NO: 31136 - RNA, 22 nt, Homo sapiens
uugauugucuucauauccagaa

SEQ ID NO: 31137 - RNA, 23 nt, Homo sapiens
gcagacgcgccccaacaccgggg

SEQ ID NO: 31138 - RNA, 21 nt, Homo sapiens
agcccgggagcugggcgcgcc

SEQ ID NO: 31139 - RNA, 20 nt, Homo sapiens
ucagucccagcaucuccuca

SEQ ID NO: 31140 - RNA, 21 nt, Homo sapiens
gcuggcggcgucgccgacucu

SEQ ID NO: 31141 - RNA, 22 nt, Homo sapiens
gcccagaccagagcuggcuuca

SEQ ID NO: 31142 - RNA, 22 nt, Homo sapiens
ggugcauccaguccuggucuca

SEQ ID NO: 31143 - RNA, 24 nt, Homo sapiens
gcgcggggcagugggcggcgcauc

SEQ ID NO: 31144 - RNA, 22 nt, Homo sapiens
gggaugccgccgccacccccgc

SEQ ID NO: 31145 - RNA, 22 nt, Homo sapiens
gccucccuuagcugguccguaa

SEQ ID NO: 31146 - RNA, 21 nt, Homo sapiens
uauauacaccugcuaugugug

SEQ ID NO: 31147 - RNA, 22 nt, Homo sapiens
cauacacauaucagguguauac

SEQ ID NO: 31148 - RNA, 22 nt, Homo sapiens
ugugacaucgcuuuaccauuca

SEQ ID NO: 31149 - RNA, 20 nt, Homo sapiens
aacaugaaugguaaagcgau

SEQ ID NO: 31150 - RNA, 18 nt, Homo sapiens
uuucagucaucauaucca

SEQ ID NO: 31151 - RNA, 18 nt, Homo sapiens
gccagcgagcgcucaccg

SEQ ID NO: 31152 - RNA, 23 nt, Homo sapiens
agccagccaacucacagugcaga

SEQ ID NO: 31153 - RNA, 24 nt, Homo sapiens
ccucugcccuguggagcaggaugu

SEQ ID NO: 31154 - RNA, 22 nt, Homo sapiens
acagucucgugagauagccaga

SEQ ID NO: 31155 - RNA, 22 nt, Homo sapiens
auccagaaguggcuaauaauau

SEQ ID NO: 31156 - RNA, 21 nt, Homo sapiens
ucaauauuauuagccacuucu

SEQ ID NO: 31157 - RNA, 22 nt, Homo sapiens
gugucuauacucugccacuuua

SEQ ID NO: 31158 - RNA, 22 nt, Homo sapiens
guaaagugacagaguauagaca

SEQ ID NO: 31159 - RNA, 21 nt, Homo sapiens
acagagugccacuuacugaga

SEQ ID NO: 31160 - RNA, 21 nt, Homo sapiens
uucaguaaguggcacucuguc

SEQ ID NO: 31161 - RNA, 22 nt, Homo sapiens
acuucgguauacuucgugaguu

SEQ ID NO: 31162 - RNA, 22 nt, Homo sapiens
ccaauucacaaaguauaccgaa

SEQ ID NO: 31163 - RNA, 22 nt, Homo sapiens
uauauaaaugcagcaugccagu

SEQ ID NO: 31164 - RNA, 22 nt, Homo sapiens
gacuggcaugcugcauuuagau

SEQ ID NO: 31165 - RNA, 19 nt, Homo sapiens
guggacagacggacggaug

SEQ ID NO: 31166 - RNA, 21 nt, Homo sapiens
uccuuccuuccucgguccacu

SEQ ID NO: 31167 - RNA, 22 nt, Homo sapiens
ugagccuugguuuucuugugua

SEQ ID NO: 31168 - RNA, 21 nt, Homo sapiens
ucaauccacacuauuauguua

SEQ ID NO: 31169 - RNA, 21 nt, Homo sapiens
uuucgagggcaagguuaagca

SEQ ID NO: 31170 - RNA, 21 nt, Homo sapiens
uugcuuaaccuuaccguccaa

SEQ ID NO: 31171 - RNA, 21 nt, Homo sapiens
uggguacuuccugaugcuuuu

SEQ ID NO: 31172 - RNA, 21 nt, Homo sapiens
auccacuucugccuguccugc

SEQ ID NO: 31173 - RNA, 22 nt, Homo sapiens
acccaugucacugccagcccug

SEQ ID NO: 31174 - RNA, 22 nt, Homo sapiens
gccaagggaauggcagggaaau

SEQ ID NO: 31175 - RNA, 22 nt, Homo sapiens
aagcccauaacuaccgccgcca

SEQ ID NO: 31176 - RNA, 22 nt, Homo sapiens
uccgagcgacccuagagggagc

SEQ ID NO: 31177 - RNA, 22 nt, Homo sapiens
uuaaaccucuacuaaguuccca

SEQ ID NO: 31178 - RNA, 21 nt, Homo sapiens
cguccugcaucacuagcccca

SEQ ID NO: 31179 - RNA, 22 nt, Homo sapiens
agcggccagcccugcugucagc

SEQ ID NO: 31180 - RNA, 21 nt, Homo sapiens
acgggccaucagcaguccaau

SEQ ID NO: 31181 - RNA, 22 nt, Homo sapiens
uucauuggacugcugauggccu

SEQ ID NO: 31182 - RNA, 22 nt, Homo sapiens
uuccugcguguuuucuguccaa

SEQ ID NO: 31183 - RNA, 20 nt, Homo sapiens
uuggacagaaaacacgcagg

SEQ ID NO: 31184 - RNA, 22 nt, Homo sapiens
auagcagcauaagccugucuca

SEQ ID NO: 31185 - RNA, 22 nt, Homo sapiens
ugagacagguucaugcugcuau

SEQ ID NO: 31186 - RNA, 20 nt, Homo sapiens
uagcagcaugaaccugucuc

SEQ ID NO: 31187 - RNA, 21 nt, Homo sapiens
gagacaggcuuaugcugcuau

SEQ ID NO: 31188 - RNA, 22 nt, Homo sapiens
ugccuccuccaggauccacaca

SEQ ID NO: 31189 - RNA, 22 nt, Homo sapiens
uuugggacugaucuugaugucu

SEQ ID NO: 31190 - RNA, 22 nt, Homo sapiens
agacaucaagaucagucccaaa

SEQ ID NO: 31191 - RNA, 22 nt, Homo sapiens
acuucucauuuucugguuccuu

SEQ ID NO: 31192 - RNA, 22 nt, Homo sapiens
aaagagucaagucaaggccaga

SEQ ID NO: 31193 - RNA, 23 nt, Homo sapiens
ugcugugggaccucuggccuuga

SEQ ID NO: 31194 - RNA, 21 nt, Homo sapiens
caagagaacuaaaacuggagu

SEQ ID NO: 31195 - RNA, 22 nt, Homo sapiens
aggcuccacuuucaguucucuu

SEQ ID NO: 31196 - RNA, 22 nt, Homo sapiens
ugcaucugccauacaccccuua

SEQ ID NO: 31197 - RNA, 21 nt, Homo sapiens
auguaauacuguuaucugaaa

SEQ ID NO: 31198 - RNA, 22 nt, Homo sapiens
auuucagguaacaguauugcuu

SEQ ID NO: 31199 - RNA, 22 nt, Homo sapiens
ucacuugaaucugcaguuagua

SEQ ID NO: 31200 - RNA, 21 nt, Homo sapiens
uucuggcacauguuaggcaau

SEQ ID NO: 31201 - RNA, 22 nt, Homo sapiens
uuauuaccuacuacauaccaga

SEQ ID NO: 31202 - RNA, 22 nt, Homo sapiens
gcaugggaacaaaaaggcaacu

SEQ ID NO: 31203 - RNA, 21 nt, Homo sapiens
uuguugcuuuuuggugccuau

SEQ ID NO: 31204 - RNA, 22 nt, Homo sapiens
ucugaucaggcaaaguugcagg

SEQ ID NO: 31205 - RNA, 22 nt, Homo sapiens
agucugcaauuuugccugauca

SEQ ID NO: 31206 - RNA, 22 nt, Homo sapiens
uuagccucaugaccagccacaa

SEQ ID NO: 31207 - RNA, 21 nt, Homo sapiens
ugugucugaucaugagacuaa

SEQ ID NO: 31208 - RNA, 22 nt, Homo sapiens
auuuagccaauugucuaucuuu

SEQ ID NO: 31209 - RNA, 22 nt, Homo sapiens
cuaaagauggacaauuggcuaa

SEQ ID NO: 31210 - RNA, 22 nt, Homo sapiens
aguaguucuuuggucucacaga

SEQ ID NO: 31211 - RNA, 22 nt, Homo sapiens
uggcugaaagaccaaagaacaa

SEQ ID NO: 31212 - RNA, 23 nt, Homo sapiens
agccgaccccuccggacagcccg

SEQ ID NO: 31213 - RNA, 23 nt, Homo sapiens
cugcaggcaaaggagaauacaga

SEQ ID NO: 31214 - RNA, 23 nt, Homo sapiens
gcuugaagguuuccauccaugua

SEQ ID NO: 31215 - RNA, 22 nt, Homo sapiens
aacauggucuagaaccuccaua

SEQ ID NO: 31216 - RNA, 22 nt, Homo sapiens
ccacagcaggcaggaugguccc

SEQ ID NO: 31217 - RNA, 22 nt, Homo sapiens
gcugcaccagccugccugcuga

SEQ ID NO: 31218 - RNA, 22 nt, Homo sapiens
acaggcaugggaggucagguga

SEQ ID NO: 31219 - RNA, 22 nt, Homo sapiens
cucaccugagcucccgugccug

SEQ ID NO: 31220 - RNA, 21 nt, Homo sapiens
ugcccucguagacaacacuca

SEQ ID NO: 31221 - RNA, 21 nt, Homo sapiens
ucaaaaugcucuccugucagu

SEQ ID NO: 31222 - RNA, 22 nt, Homo sapiens
cagcuguccgagucccagguca

SEQ ID NO: 31223 - RNA, 22 nt, Homo sapiens
aacucugucuuuacuccugaga

SEQ ID NO: 31224 - RNA, 22 nt, Homo sapiens
acucaugagugaagacagaguu

SEQ ID NO: 31225 - RNA, 22 nt, Homo sapiens
ggccuccggaagcuccgcccca

SEQ ID NO: 31226 - RNA, 22 nt, Homo sapiens
agggcaguauacuugcugauug

SEQ ID NO: 31227 - RNA, 22 nt, Homo sapiens
acaaccagcuaagacacugcca

SEQ ID NO: 31228 - RNA, 22 nt, Homo sapiens
ggagcagcacagccaauauugg

SEQ ID NO: 31229 - RNA, 21 nt, Homo sapiens
gccaauauuucugugcugcua

SEQ ID NO: 31230 - RNA, 21 nt, Homo sapiens
acuagcuuauacauaaaauua

SEQ ID NO: 31231 - RNA, 22 nt, Homo sapiens
cugcacuuuuaugaauaagcuc

SEQ ID NO: 31232 - RNA, 22 nt, Homo sapiens
cucccuucuuuccucccgucuu

SEQ ID NO: 31233 - RNA, 22 nt, Homo sapiens
cuaccauaggguaaaaccacug

SEQ ID NO: 31234 - RNA, 22 nt, Homo sapiens
aaagacguggagaaauuagaau

SEQ ID NO: 31235 - RNA, 22 nt, Homo sapiens
guccaaaguuggggugcugguu

SEQ ID NO: 31236 - RNA, 24 nt, Homo sapiens
gaggugacucuauccuaugucuuu

SEQ ID NO: 31237 - RNA, 22 nt, Homo sapiens
gguucaguuguucaaccaguua

SEQ ID NO: 31238 - RNA, 20 nt, Homo sapiens
cuggggaaaaggguggcacg

SEQ ID NO: 31239 - RNA, 17 nt, Homo sapiens
ccaccgccuggccccac

SEQ ID NO: 31240 - RNA, 22 nt, Homo sapiens
uugcccucucaacccagcuuuu

SEQ ID NO: 31241 - RNA, 22 nt, Homo sapiens
gaaccuaucuccccucuggacc

SEQ ID NO: 31242 - RNA, 23 nt, Homo sapiens
aaaacaccaagaucugaaggcua

SEQ ID NO: 31243 - RNA, 23 nt, Homo sapiens
gggcagccuucagauccaagugg

SEQ ID NO: 31244 - RNA, 22 nt, Homo sapiens
gggagaggucucccugcgcaca

SEQ ID NO: 31245 - RNA, 22 nt, Homo sapiens
ccagugucuccaguaguagaca

SEQ ID NO: 31246 - RNA, 21 nt, Homo sapiens
ggggagcgggggcccugccuu

SEQ ID NO: 31247 - RNA, 21 nt, Homo sapiens
cuggaggacggcaacagucag

SEQ ID NO: 31248 - RNA, 25 nt, Homo sapiens
uggugcaaaaguaauugugguuuuu

SEQ ID NO: 31249 - RNA, 23 nt, Homo sapiens
ugcaaaaguaauugcgguuuuug

SEQ ID NO: 31250 - RNA, 22 nt, Homo sapiens
ugucuuacucccucaggcacau

SEQ ID NO: 31251 - RNA, 20 nt, Homo sapiens
cagugccugagggaguaaga

SEQ ID NO: 31252 - RNA, 22 nt, Homo sapiens
gggucccucuccaaaugugucu

SEQ ID NO: 31253 - RNA, 22 nt, Homo sapiens
agacacauuuggagagggaacc

SEQ ID NO: 31254 - RNA, 21 nt, Homo sapiens
cuaaguagugaaagaaauuuu

SEQ ID NO: 31255 - RNA, 21 nt, Homo sapiens
aauuaaaauagccuucacuaa

SEQ ID NO: 31256 - RNA, 20 nt, Homo sapiens
caucagaaagcguuuacagu

SEQ ID NO: 31257 - RNA, 22 nt, Homo sapiens
acugauuugcuucaucacaugc

SEQ ID NO: 31258 - RNA, 24 nt, Homo sapiens
cagccaguauuacucaucacuuug

SEQ ID NO: 31259 - RNA, 20 nt, Homo sapiens
cggcgccuccuuuccgauuc

SEQ ID NO: 31260 - RNA, 21 nt, Homo sapiens
uaagaauuucuuucuucacaa

SEQ ID NO: 31261 - RNA, 22 nt, Homo sapiens
uccauuucucaagaugccuccu

SEQ ID NO: 31262 - RNA, 24 nt, Homo sapiens
gaaggguugggcuuuuuuuuuugu

SEQ ID NO: 31263 - RNA, 22 nt, Homo sapiens
gaacaaaaaaaaaaguacaaca

SEQ ID NO: 31264 - RNA, 21 nt, Homo sapiens
gagccgcgaggagccgagaga

SEQ ID NO: 31265 - RNA, 23 nt, Homo sapiens
gccugcaucaugaaaugcccucg

SEQ ID NO: 31266 - RNA, 22 nt, Homo sapiens
acauaucaugagugcacuucau

SEQ ID NO: 31267 - RNA, 22 nt, Homo sapiens
gcucuuuucauuaauguagaca

SEQ ID NO: 31268 - RNA, 22 nt, Homo sapiens
cugggugcgggaugcaggguga

SEQ ID NO: 31269 - RNA, 22 nt, Homo sapiens
ggcccagcccagcccagcccac

SEQ ID NO: 31270 - RNA, 20 nt, Homo sapiens
ccugcagaccccgacccgcg

SEQ ID NO: 31271 - RNA, 21 nt, Homo sapiens
caggcacgggagcucagguga

SEQ ID NO: 31272 - RNA, 20 nt, Homo sapiens
ucaccugaccucccaugccu

SEQ ID NO: 31273 - RNA, 23 nt, Homo sapiens
agaaaggacauagggugcugaug

SEQ ID NO: 31274 - RNA, 22 nt, Homo sapiens
cccaucuugcaacuaugucuuu

SEQ ID NO: 31275 - RNA, 22 nt, Homo sapiens
gguuaguggaccaggucacaaa

SEQ ID NO: 31276 - RNA, 22 nt, Homo sapiens
gugugcucucuggucaaccauc

SEQ ID NO: 31277 - RNA, 20 nt, Homo sapiens
acccucucaacccagcuuuu

SEQ ID NO: 31278 - RNA, 21 nt, Homo sapiens
agguaauaccaauaccuugug

SEQ ID NO: 31279 - RNA, 22 nt, Homo sapiens
ugaacacaagguacugguacua

SEQ ID NO: 31280 - RNA, 22 nt, Homo sapiens
accuucccugguacagaauacu

SEQ ID NO: 31281 - RNA, 22 nt, Homo sapiens
accagcuaacaauacacugcca

SEQ ID NO: 31282 - RNA, 22 nt, Homo sapiens
acagagagcuugcccuuguaua

SEQ ID NO: 31283 - RNA, 22 nt, Homo sapiens
auauacaaagggcaaccucgcu

SEQ ID NO: 31284 - RNA, 22 nt, Homo sapiens
auggcaguggaguuagugauug

SEQ ID NO: 31285 - RNA, 23 nt, Homo sapiens
caaucagcuaaugacacugccua

SEQ ID NO: 31286 - RNA, 22 nt, Homo sapiens
aguggcaggguaguuguggcug

SEQ ID NO: 31287 - RNA, 22 nt, Homo sapiens
gccagcuaacaauacacugccu

SEQ ID NO: 31288 - RNA, 22 nt, Homo sapiens
ccuggccgugugguuagugauu

SEQ ID NO: 31289 - RNA, 23 nt, Homo sapiens
gcaaucagcuaacuacacugccu

SEQ ID NO: 31290 - RNA, 20 nt, Homo sapiens
ugggccaccgccgagcggac

SEQ ID NO: 31291 - RNA, 23 nt, Homo sapiens
ccaccuggcaagaacaggcguuc

SEQ ID NO: 31292 - RNA, 19 nt, Homo sapiens
accagugcccugcacacuu

SEQ ID NO: 31293 - RNA, 21 nt, Homo sapiens
ucaaucacagauagcaccccu

SEQ ID NO: 31294 - RNA, 22 nt, Homo sapiens
gcagcaaacaucugacugaaag

SEQ ID NO: 31295 - RNA, 22 nt, Homo sapiens
cuuccagucggggauguuuaca

SEQ ID NO: 31296 - RNA, 22 nt, Homo sapiens
cuuccagucgaggauguuuaca

SEQ ID NO: 31297 - RNA, 22 nt, Homo sapiens
uggcaaaaccgcaauuacuucu

SEQ ID NO: 31298 - RNA, 22 nt, Homo sapiens
gcaaaaguaauugccaguuuug

SEQ ID NO: 31299 - RNA, 22 nt, Homo sapiens
gguaaaacucgcaauuacuuuu

SEQ ID NO: 31300 - RNA, 22 nt, Homo sapiens
acaaaagcaacugagguucuug

SEQ ID NO: 31301 - RNA, 22 nt, Homo sapiens
gcaaaaguaauugagauuuuug

SEQ ID NO: 31302 - RNA, 22 nt, Homo sapiens
gcaaaagaaacugugguuuuug

SEQ ID NO: 31303 - RNA, 22 nt, Homo sapiens
ggcaaaaaccacaauuacuuuu

SEQ ID NO: 31304 - RNA, 21 nt, Homo sapiens
agagcucauccauaguuguca

SEQ ID NO: 31305 - RNA, 21 nt, Homo sapiens
uugucuaaccagucaccuguu

SEQ ID NO: 31306 - RNA, 21 nt, Homo sapiens
aaaacaaaaucucaccguuuu

SEQ ID NO: 31307 - RNA, 21 nt, Homo sapiens
acuggcugagucaggacuagc

SEQ ID NO: 31308 - RNA, 21 nt, Homo sapiens
aucagagguucagcuuacccu

SEQ ID NO: 31309 - RNA, 22 nt, Homo sapiens
aaagaugagcuaaugguaauau

SEQ ID NO: 31310 - RNA, 22 nt, Homo sapiens
cucauauuacaaugagcucauc

SEQ ID NO: 31311 - RNA, 19 nt, Homo sapiens
gggaaacguaugucaaccu

SEQ ID NO: 31312 - RNA, 20 nt, Homo sapiens
guguguauacauuuauacau

SEQ ID NO: 31313 - RNA, 24 nt, Homo sapiens
cugaucaguuacacaucacuucag

SEQ ID NO: 31314 - RNA, 22 nt, Homo sapiens
gauuccaauuuuuccacaucuu

SEQ ID NO: 31315 - RNA, 21 nt, Homo sapiens
cagguaccaauauuuuaucua

SEQ ID NO: 31316 - RNA, 21 nt, Homo sapiens
acaauccuagagcacaagaag

SEQ ID NO: 31317 - RNA, 22 nt, Homo sapiens
ggaccuaaaaauacaaugcaua

SEQ ID NO: 31318 - RNA, 21 nt, Homo sapiens
gugacucaucaccuauggaaa

SEQ ID NO: 31319 - RNA, 21 nt, Homo sapiens
guucuaacccauuguggccaa

SEQ ID NO: 31320 - RNA, 22 nt, Homo sapiens
acaguggucaucgagugacaca

SEQ ID NO: 31321 - RNA, 23 nt, Homo sapiens
gagcaaggcucuugucuguaagu

SEQ ID NO: 31322 - RNA, 19 nt, Homo sapiens
guccugaauuccgcagccu

SEQ ID NO: 31323 - RNA, 23 nt, Homo sapiens
aggagaaggcaccaugggauuua

SEQ ID NO: 31324 - RNA, 21 nt, Homo sapiens
aucuuugauuuucaguaguuu

SEQ ID NO: 31325 - RNA, 21 nt, Homo sapiens
guuauagaucuggauuugaac

SEQ ID NO: 31326 - RNA, 20 nt, Homo sapiens
agagaugagagaaacacccu

SEQ ID NO: 31327 - RNA, 24 nt, Homo sapiens
acugggcacaaacauguccagguc

SEQ ID NO: 31328 - RNA, 20 nt, Homo sapiens
auuucuauaucuaucuccau

SEQ ID NO: 31329 - RNA, 19 nt, Homo sapiens
aagacauuuucagacagcu

SEQ ID NO: 31330 - RNA, 21 nt, Homo sapiens
gcugaggucugggccaggucu

SEQ ID NO: 31331 - RNA, 23 nt, Homo sapiens
ggacauuguuucagugcccaagu

SEQ ID NO: 31332 - RNA, 24 nt, Homo sapiens
acgcagagcccgaaagcccccagu

SEQ ID NO: 31333 - RNA, 23 nt, Homo sapiens
acagcgcucgcaaccgcagcgau

SEQ ID NO: 31334 - RNA, 22 nt, Homo sapiens
caagacacauuuggagagggac

SEQ ID NO: 31335 - RNA, 22 nt, Homo sapiens
cuaccugagcuagcauacaagu

SEQ ID NO: 31336 - RNA, 22 nt, Homo sapiens
caaaagucaagcuuauccuaaa

SEQ ID NO: 31337 - RNA, 21 nt, Homo sapiens
caguagagauuguuucaacac

SEQ ID NO: 31338 - RNA, 22 nt, Homo sapiens
aaggugauggucagcagacaua

SEQ ID NO: 31339 - RNA, 22 nt, Homo sapiens
gcucggccccggccccagcccc

SEQ ID NO: 31340 - RNA, 22 nt, Homo sapiens
aaccauacaaccuacuaccuca

SEQ ID NO: 31341 - RNA, 21 nt, Homo sapiens
ugacugcagagcaaaagacac

SEQ ID NO: 31342 - RNA, 24 nt, Homo sapiens
gcuccagucucgacguucccgggg

SEQ ID NO: 31343 - RNA, 22 nt, Homo sapiens
uccggggacgaacgggacgggu

SEQ ID NO: 31344 - RNA, 22 nt, Homo sapiens
auccuucuacaaauucacccau

SEQ ID NO: 31345 - RNA, 22 nt, Homo sapiens
ccaguagcacggcucaguccag

SEQ ID NO: 31346 - RNA, 22 nt, Homo sapiens
ccaguagcauggcucaguccag

SEQ ID NO: 31347 - RNA, 22 nt, Homo sapiens
aaaauacauauauaucuacgua

SEQ ID NO: 31348 - RNA, 22 nt, Homo sapiens
gcucuuuucauuaauguagaca

SEQ ID NO: 31349 - RNA, 22 nt, Homo sapiens
gacucgaaccacugauccagca

SEQ ID NO: 31350 - RNA, 19 nt, Homo sapiens
ucccugauccaaaaaucca

SEQ ID NO: 31351 - RNA, 22 nt, Homo sapiens
aaucagucucauugcuuuauaa

SEQ ID NO: 31352 - RNA, 23 nt, Homo sapiens
acccuauaagcaauauugcacua

SEQ ID NO: 31353 - RNA, 22 nt, Homo sapiens
gcagagacaauauugauagggu

SEQ ID NO: 31354 - RNA, 17 nt, Homo sapiens
aagcauggaagcacuua

SEQ ID NO: 31355 - RNA, 22 nt, Homo sapiens
gugggguggguggucaggccga

SEQ ID NO: 31356 - RNA, 21 nt, Homo sapiens
cggcccccccccccccccccc

SEQ ID NO: 31357 - RNA, 22 nt, Homo sapiens
agaaaggcagcaggucguauag

SEQ ID NO: 31358 - RNA, 22 nt, Homo sapiens
aacuaugcaaccuacuaccucu

SEQ ID NO: 31359 - RNA, 22 nt, Homo sapiens
gcagcaaguacccacagugcgg

SEQ ID NO: 31360 - RNA, 21 nt, Homo sapiens
aucugcacugucagcacuuua

SEQ ID NO: 31361 - RNA, 22 nt, Homo sapiens
cacuccuauaauugauccaguu

SEQ ID NO: 31362 - RNA, 26 nt, Homo sapiens
aaccaucucauacaaaccaacuacuu

SEQ ID NO: 31363 - RNA, 21 nt, Homo sapiens
auguaggccuuuagaucacuu

SEQ ID NO: 31364 - RNA, 22 nt, Homo sapiens
uauaggccuuuagaucaucuga

SEQ ID NO: 31365 - RNA, 21 nt, Homo sapiens
uuuaagugaucuaaaggccua

SEQ ID NO: 31366 - RNA, 21 nt, Homo sapiens
agcgccuuuggcagcuagagu

SEQ ID NO: 31367 - RNA, 22 nt, Homo sapiens
uaaaugaauucaauuuccuucu

SEQ ID NO: 31368 - RNA, 21 nt, Homo sapiens
ugcaggcugaucuucuucucu

SEQ ID NO: 31369 - RNA, 24 nt, Homo sapiens
acugcaggcuccagcuuccaggcu

SEQ ID NO: 31370 - RNA, 23 nt, Homo sapiens
aaucuacuuucuuugcucauccu

SEQ ID NO: 31371 - RNA, 22 nt, Homo sapiens
uggaugagcaaagaaagugguu

SEQ ID NO: 31372 - RNA, 22 nt, Homo sapiens
aaccacuuucuuugcucauccg

SEQ ID NO: 31373 - RNA, 22 nt, Homo sapiens
agcuagugagaagucaaugccu

SEQ ID NO: 31374 - RNA, 21 nt, Homo sapiens
ggucagaacccaucauucacu

SEQ ID NO: 31375 - RNA, 21 nt, Homo sapiens
uuccacgaccuaauccuaacu

SEQ ID NO: 31376 - RNA, 19 nt, Homo sapiens
aagccaaagccuuauccau

SEQ ID NO: 31377 - RNA, 22 nt, Homo sapiens
acucaguaugccaggguaccau

SEQ ID NO: 31378 - RNA, 23 nt, Homo sapiens
aacaggugcucaaauaagacuug

SEQ ID NO: 31379 - RNA, 22 nt, Homo sapiens
aacaacacuugaccacauccug

SEQ ID NO: 31380 - RNA, 23 nt, Homo sapiens
agcccuguucuacagcccugagg

SEQ ID NO: 31381 - RNA, 21 nt, Homo sapiens
uggggauuacacuucaacagg

SEQ ID NO: 31382 - RNA, 18 nt, Homo sapiens
cccccaccaccacgcccg

SEQ ID NO: 31383 - RNA, 20 nt, Homo sapiens
cacccccaccaccacgcccg

SEQ ID NO: 31384 - RNA, 23 nt, Homo sapiens
acacagcucuuccauaucuccag

SEQ ID NO: 31385 - RNA, 26 nt, Homo sapiens
uuucagaauuugcugccaucaucauc

SEQ ID NO: 31386 - RNA, 25 nt, Homo sapiens
aagaaagagucuugcuuugucgccc

SEQ ID NO: 31387 - RNA, 25 nt, Homo sapiens
acugcagccucaaccucauggguuc

SEQ ID NO: 31388 - RNA, 17 nt, Homo sapiens
gacagccucucccccac

SEQ ID NO: 31389 - RNA, 20 nt, Homo sapiens
ugucuccacagggcucuuua

SEQ ID NO: 31390 - RNA, 22 nt, Homo sapiens
auagaugauaugcacaguacua

SEQ ID NO: 31391 - RNA, 20 nt, Homo sapiens
aagcagaaaaaggcaaacga

SEQ ID NO: 31392 - RNA, 21 nt, Homo sapiens
ucuccagaucagggcagucca

SEQ ID NO: 31393 - RNA, 22 nt, Homo sapiens
gcacaaaucuccagaccaccca

SEQ ID NO: 31394 - RNA, 22 nt, Homo sapiens
agacaacaaugccaaccucaca

SEQ ID NO: 31395 - RNA, 17 nt, Homo sapiens
caccugaauuacuugaa

SEQ ID NO: 31396 - RNA, 22 nt, Homo sapiens
ucccucacacagaauuccagaa

SEQ ID NO: 31397 - RNA, 22 nt, Homo sapiens
ucucucccauuagaguugaaaa

SEQ ID NO: 31398 - RNA, 18 nt, Homo sapiens
caccaccagagccaacgu

SEQ ID NO: 31399 - RNA, 22 nt, Homo sapiens
uggacguuugcaggggaggugg

SEQ ID NO: 31400 - RNA, 22 nt, Homo sapiens
cacgaccgacgccacgccgagu

SEQ ID NO: 31401 - RNA, 21 nt, Homo sapiens
agccggucgagguccggucga

SEQ ID NO: 31402 - RNA, 22 nt, Homo sapiens
agccuauggaauucaguucuca

SEQ ID NO: 31403 - RNA, 22 nt, Homo sapiens
aauaggucaaccguguaugauu

SEQ ID NO: 31404 - RNA, 22 nt, Homo sapiens
cgaaggcaacacggauaaccua

SEQ ID NO: 31405 - RNA, 21 nt, Homo sapiens
aggcggcaggcacaggacugg

SEQ ID NO: 31406 - RNA, 22 nt, Homo sapiens
uggcagcagcggagggggcaga

SEQ ID NO: 31407 - RNA, 22 nt, Homo sapiens
ccucccagugcgggaccccucc

SEQ ID NO: 31408 - RNA, 22 nt, Homo sapiens
cagaagugggccgggcacaggg

SEQ ID NO: 31409 - RNA, 20 nt, Homo sapiens
cccgccgcgucgcccugggg

SEQ ID NO: 31410 - RNA, 22 nt, Homo sapiens
ggcccgggcagcaaggcaaggu

SEQ ID NO: 31411 - RNA, 21 nt, Homo sapiens
gugacagagccaagcacaaau

SEQ ID NO: 31412 - RNA, 22 nt, Homo sapiens
aucuccaaacagcaaggacaau

SEQ ID NO: 31413 - RNA, 21 nt, Homo sapiens
uuguccauuguaucuggggau

SEQ ID NO: 31414 - RNA, 23 nt, Homo sapiens
gcuuugacaauacuauugcacug

SEQ ID NO: 31415 - RNA, 22 nt, Homo sapiens
aguagugcaauaaagucagagc

SEQ ID NO: 31416 - RNA, 23 nt, Homo sapiens
cuacuaaaacauggaagcacuua

SEQ ID NO: 31417 - RNA, 22 nt, Homo sapiens
gaaagcacuuccauguuaaagu

SEQ ID NO: 31418 - RNA, 23 nt, Homo sapiens
ccacugaaacauggaagcacuua

SEQ ID NO: 31419 - RNA, 22 nt, Homo sapiens
cagcagguacccccauguuaaa

SEQ ID NO: 31420 - RNA, 23 nt, Homo sapiens
acacucaaacauggaagcacuua

SEQ ID NO: 31421 - RNA, 22 nt, Homo sapiens
gcaagugccuccauguuaaagu

SEQ ID NO: 31422 - RNA, 22 nt, Homo sapiens
ucaccauugcuaaagugcaauu

SEQ ID NO: 31423 - RNA, 22 nt, Homo sapiens
agaguugcauauuagcaacagu

SEQ ID NO: 31424 - RNA, 23 nt, Homo sapiens
acugaggggccucagaccgagcu

SEQ ID NO: 31425 - RNA, 22 nt, Homo sapiens
ugcaaaaguagucucaguuuuu

SEQ ID NO: 31426 - RNA, 19 nt, Homo sapiens
aaaaguaauuacaguuuuu

SEQ ID NO: 31427 - RNA, 22 nt, Homo sapiens
guacaaaaguaauuacaguuuu

SEQ ID NO: 31428 - RNA, 23 nt, Homo sapiens
caaaaacugcaauuacuuuugca

SEQ ID NO: 31429 - RNA, 23 nt, Homo sapiens
ugcaaaaguaauugcgguuuuug

SEQ ID NO: 31430 - RNA, 22 nt, Homo sapiens
gacaaaaaccgcgauuacuuuu

SEQ ID NO: 31431 - RNA, 22 nt, Homo sapiens
agcaaaauccgcaaguacuuuu

SEQ ID NO: 31432 - RNA, 22 nt, Homo sapiens
gacaaaacccgcaaauacuuuu

SEQ ID NO: 31433 - RNA, 21 nt, Homo sapiens
caaaaaccacaaauaccuuug

SEQ ID NO: 31434 - RNA, 22 nt, Homo sapiens
gcaaaaguaacugcaguuuugg

SEQ ID NO: 31435 - RNA, 22 nt, Homo sapiens
ggcaaaaaccgcaauuacuuuu

SEQ ID NO: 31436 - RNA, 22 nt, Homo sapiens
aaaguaacugcaguuuuugcua

SEQ ID NO: 31437 - RNA, 20 nt, Homo sapiens
cucugcccuucccaaccucc

SEQ ID NO: 31438 - RNA, 18 nt, Homo sapiens
gcucgcccccccgccuca

SEQ ID NO: 31439 - RNA, 20 nt, Homo sapiens
cgcccccccgcuucaucucu

SEQ ID NO: 31440 - RNA, 24 nt, Homo sapiens
ccgccccgccccaccccggccucc

SEQ ID NO: 31441 - RNA, 19 nt, Homo sapiens
gccccgccccucgcucccc

SEQ ID NO: 31442 - RNA, 23 nt, Homo sapiens
uguaggcuggggauaaaugaaua

SEQ ID NO: 31443 - RNA, 24 nt, Homo sapiens
auccaaucauuuucccuagccagu

SEQ ID NO: 31444 - RNA, 22 nt, Homo sapiens
uguaggcugggaggcaaaugaa

SEQ ID NO: 31445 - RNA, 24 nt, Homo sapiens
uacccaaucaucucccuuagccca

SEQ ID NO: 31446 - RNA, 22 nt, Homo sapiens
gcugaggcuguggggcuggagu

SEQ ID NO: 31447 - RNA, 22 nt, Homo sapiens
aagaccagcaccaauuccuccu

SEQ ID NO: 31448 - RNA, 22 nt, Homo sapiens
uauccacuacaccccgcugccu

SEQ ID NO: 31449 - RNA, 22 nt, Homo sapiens
agaggcaggguaguguaaugga

SEQ ID NO: 31450 - RNA, 22 nt, Homo sapiens
cgggaagugcuagcucagcagu

SEQ ID NO: 31451 - RNA, 23 nt, Homo sapiens
cuaccugcacgaacagcacuuug

SEQ ID NO: 31452 - RNA, 23 nt, Homo sapiens
gcacaugugcacacagccgggug

SEQ ID NO: 31453 - RNA, 23 nt, Homo sapiens
caaggcagcacuguaaagaagcu

SEQ ID NO: 31454 - RNA, 23 nt, Homo sapiens
ucauagcccuguacaaugcugcu

SEQ ID NO: 31455 - RNA, 17 nt, Homo sapiens
uuggcccuuuucucagg

SEQ ID NO: 31456 - RNA, 19 nt, Homo sapiens
uggugcugacucaguggcc

SEQ ID NO: 31457 - RNA, 18 nt, Homo sapiens
acccccuggacaugcccu

SEQ ID NO: 31458 - RNA, 23 nt, Homo sapiens
gagaugguggaguagcuccaggc

SEQ ID NO: 31459 - RNA, 17 nt, Homo sapiens
uccaucucugaacacug

SEQ ID NO: 31460 - RNA, 18 nt, Homo sapiens
accuucaucaggucagau

SEQ ID NO: 31461 - RNA, 18 nt, Homo sapiens
cucaguccccaccucugg

SEQ ID NO: 31462 - RNA, 17 nt, Homo sapiens
ccaaggcgguggcgggg

SEQ ID NO: 31463 - RNA, 22 nt, Homo sapiens
uccugaccccuagacccaacug

SEQ ID NO: 31464 - RNA, 19 nt, Homo sapiens
ugggacuccaugccccaag

SEQ ID NO: 31465 - RNA, 16 nt, Homo sapiens
ugggucccuguuuccu

SEQ ID NO: 31466 - RNA, 17 nt, Homo sapiens
cagguagucugaauguc

SEQ ID NO: 31467 - RNA, 18 nt, Homo sapiens
ggccaaggcacuuagaau

SEQ ID NO: 31468 - RNA, 17 nt, Homo sapiens
aaugaccaugacugagu

SEQ ID NO: 31469 - RNA, 19 nt, Homo sapiens
cccagagcugagcccacag

SEQ ID NO: 31470 - RNA, 16 nt, Homo sapiens
ggccaaggccuccuag

SEQ ID NO: 31471 - RNA, 16 nt, Homo sapiens
gugccaccgagcugga

SEQ ID NO: 31472 - RNA, 21 nt, Homo sapiens
cacauccugagaggaggagcc

SEQ ID NO: 31473 - RNA, 21 nt, Homo sapiens
gccagggcugucugugccugc

SEQ ID NO: 31474 - RNA, 20 nt, Homo sapiens
gcccuccccugacucccuga

SEQ ID NO: 31475 - RNA, 19 nt, Homo sapiens
ccccaccuuuucuuccccc

SEQ ID NO: 31476 - RNA, 18 nt, Homo sapiens
acaaucacuaguugaaug

SEQ ID NO: 31477 - RNA, 18 nt, Homo sapiens
cagggggagggacugcug

SEQ ID NO: 31478 - RNA, 17 nt, Homo sapiens
aaagaagugguaauugg

SEQ ID NO: 31479 - RNA, 17 nt, Homo sapiens
gcacaugagucacugag

SEQ ID NO: 31480 - RNA, 21 nt, Homo sapiens
guguacugugcucagaacugc

SEQ ID NO: 31481 - RNA, 18 nt, Homo sapiens
caagggcaaacccccuag

SEQ ID NO: 31482 - RNA, 16 nt, Homo sapiens
gaagccgggaggagag

SEQ ID NO: 31483 - RNA, 21 nt, Homo sapiens
gcucugcucagaacuacacuc

SEQ ID NO: 31484 - RNA, 18 nt, Homo sapiens
ccccccuccccgggaccc

SEQ ID NO: 31485 - RNA, 18 nt, Homo sapiens
uccuggaugcaaauuuua

SEQ ID NO: 31486 - RNA, 17 nt, Homo sapiens
aaacucgcugagcccca

SEQ ID NO: 31487 - RNA, 18 nt, Homo sapiens
auggggugaugugagccc

SEQ ID NO: 31488 - RNA, 18 nt, Homo sapiens
augagucggacucgccgc

SEQ ID NO: 31489 - RNA, 17 nt, Homo sapiens
gguaccaggaguggggu

SEQ ID NO: 31490 - RNA, 19 nt, Homo sapiens
aaagugcccucaagggaga

SEQ ID NO: 31491 - RNA, 17 nt, Homo sapiens
ggaaacucagcagacaa

SEQ ID NO: 31492 - RNA, 19 nt, Homo sapiens
ugauagcccugcacaaugc

SEQ ID NO: 31493 - RNA, 19 nt, Homo sapiens
gagggaagaaaggagggca

SEQ ID NO: 31494 - RNA, 16 nt, Homo sapiens
agcuguuccugcugaa

SEQ ID NO: 31495 - RNA, 18 nt, Homo sapiens
ccaaggccggcccagggg

SEQ ID NO: 31496 - RNA, 17 nt, Homo sapiens
cuguuccugucaggcug

SEQ ID NO: 31497 - RNA, 17 nt, Homo sapiens
cccugcuguagacuccc

SEQ ID NO: 31498 - RNA, 18 nt, Homo sapiens
aaggaaaacauugcacug

SEQ ID NO: 31499 - RNA, 17 nt, Homo sapiens
ugagccugagcccacau

SEQ ID NO: 31500 - RNA, 16 nt, Homo sapiens
cacagacaggaaggca

SEQ ID NO: 31501 - RNA, 22 nt, Homo sapiens
cugccuccuccuccugucccag

SEQ ID NO: 31502 - RNA, 18 nt, Homo sapiens
gccucucaugucaccagc

SEQ ID NO: 31503 - RNA, 18 nt, Homo sapiens
gaaguaguccagcuccca

SEQ ID NO: 31504 - RNA, 20 nt, Homo sapiens
ucacaagugaaguaguggga

SEQ ID NO: 31505 - RNA, 18 nt, Homo sapiens
cucgcugagccacacugg

SEQ ID NO: 31506 - RNA, 17 nt, Homo sapiens
cuguccucagcucagaa

SEQ ID NO: 31507 - RNA, 17 nt, Homo sapiens
ugcccuggacaugccgg

SEQ ID NO: 31508 - RNA, 18 nt, Homo sapiens
gaacuggaggugucuagg

SEQ ID NO: 31509 - RNA, 17 nt, Homo sapiens
uacugccuuucucucca

SEQ ID NO: 31510 - RNA, 19 nt, Homo sapiens
ggaaacaggaaaaaacauu

SEQ ID NO: 31511 - RNA, 18 nt, Homo sapiens
aagaagaaacuccaggga

SEQ ID NO: 31512 - RNA, 18 nt, Homo sapiens
uggaauccuagacuccag

SEQ ID NO: 31513 - RNA, 16 nt, Homo sapiens
gggacaugaaugcugc

SEQ ID NO: 31514 - RNA, 18 nt, Homo sapiens
cacacucagcucucuuuc

SEQ ID NO: 31515 - RNA, 19 nt, Homo sapiens
uggggacaggaacaaggcc

SEQ ID NO: 31516 - RNA, 20 nt, Homo sapiens
ggguuuggggccagggggcu

SEQ ID NO: 31517 - RNA, 18 nt, Homo sapiens
cugucccauuucccagag

SEQ ID NO: 31518 - RNA, 18 nt, Homo sapiens
guccagcucagaaagcgg

SEQ ID NO: 31519 - RNA, 17 nt, Homo sapiens
caccagcuagccucacc

SEQ ID NO: 31520 - RNA, 17 nt, Homo sapiens
aaacucccuggcaaugu

SEQ ID NO: 31521 - RNA, 17 nt, Homo sapiens
agcauguacccacagug

SEQ ID NO: 31522 - RNA, 17 nt, Homo sapiens
guggcuuugcucaggga

SEQ ID NO: 31523 - RNA, 18 nt, Homo sapiens
aggaagcuacagaauccc

SEQ ID NO: 31524 - RNA, 21 nt, Homo sapiens
cgcagggcgguccaccgcuaa

SEQ ID NO: 31525 - RNA, 21 nt, Homo sapiens
ccccacgcgcugagcccacag

SEQ ID NO: 31526 - RNA, 18 nt, Homo sapiens
ucugaggcuguggggcug

SEQ ID NO: 31527 - RNA, 20 nt, Homo sapiens
uuaagguuagggucucaggg

SEQ ID NO: 31528 - RNA, 18 nt, Homo sapiens
ucacugagacaagugcaa

SEQ ID NO: 31529 - RNA, 20 nt, Homo sapiens
gucugggagacagaggaaca

SEQ ID NO: 31530 - RNA, 19 nt, Homo sapiens
ccagucccccaugcaagcc

SEQ ID NO: 31531 - RNA, 17 nt, Homo sapiens
aauccugggaaaacugg

SEQ ID NO: 31532 - RNA, 19 nt, Homo sapiens
guggaacuagggucucagg

SEQ ID NO: 31533 - RNA, 19 nt, Homo sapiens
gcaaggcucugaucugagg

SEQ ID NO: 31534 - RNA, 22 nt, Homo sapiens
ucagaccgagacaagugcaaug

SEQ ID NO: 31535 - RNA, 21 nt, Homo sapiens
caauugcccaagucuccgccu

SEQ ID NO: 31536 - RNA, 22 nt, Homo sapiens
cgugcaaguaaccaagaauagg

SEQ ID NO: 31537 - RNA, 19 nt, Homo sapiens
ccugcuccaaaaauccauu

SEQ ID NO: 31538 - RNA, 22 nt, Homo sapiens
ugcuguuagcccuagccccgca

SEQ ID NO: 31539 - RNA, 22 nt, Homo sapiens
ggcaaaauccgcaauuacuuuu

SEQ ID NO: 31540 - RNA, 22 nt, Homo sapiens
acaaaauccacaauuacuuuug

SEQ ID NO: 31541 - RNA, 23 nt, Homo sapiens
ucaccaaaacauggaagcacuua

SEQ ID NO: 31542 - RNA, 23 nt, Homo sapiens
agcaaguacauccacguuuaagu

SEQ ID NO: 31543 - RNA, 21 nt, Homo sapiens
gaaagacaguagauuguauag

SEQ ID NO: 31544 - RNA, 22 nt, Homo sapiens
aacuauacaaccuacuaccuca

SEQ ID NO: 31545 - RNA, 22 nt, Homo sapiens
ggaaagcuaggaggcuguacag

SEQ ID NO: 31546 - RNA, 20 nt, Homo sapiens
ggagaccacaaugccuggug

SEQ ID NO: 31547 - RNA, 23 nt, Homo sapiens
cccaacagacauggcgguacuca

SEQ ID NO: 31548 - RNA, 22 nt, Homo sapiens
uucacacugcaugcucugggua

SEQ ID NO: 31549 - RNA, 22 nt, Homo sapiens
gaccucagcuaugacagcacuu

SEQ ID NO: 31550 - RNA, 23 nt, Homo sapiens
gaaagugcccucaaggcugagug

SEQ ID NO: 31551 - RNA, 22 nt, Homo sapiens
gaaggcagugucgugcugucga

SEQ ID NO: 31552 - RNA, 22 nt, Homo sapiens
cccaacaacaggaaacuaccua

SEQ ID NO: 31553 - RNA, 21 nt, Homo sapiens
uucaguuaucacaguacugua

SEQ ID NO: 31554 - RNA, 22 nt, Homo sapiens
agcaucagcacugugauaacug

SEQ ID NO: 31555 - RNA, 23 nt, Homo sapiens
ucaguuuugcauagauuugcaca

SEQ ID NO: 31556 - RNA, 22 nt, Homo sapiens
uguagugcaacuaugcaaaacu

SEQ ID NO: 31557 - RNA, 23 nt, Homo sapiens
gcuggaugcaaaccugcaaaacu

SEQ ID NO: 31558 - RNA, 22 nt, Homo sapiens
ugaaaugcaaaccugcaaaacu

SEQ ID NO: 31559 - RNA, 23 nt, Homo sapiens
ucaguuuugcauggauuugcaca

SEQ ID NO: 31560 - RNA, 23 nt, Homo sapiens
uccaaucaguuccugaugcagua

SEQ ID NO: 31561 - RNA, 22 nt, Homo sapiens
ccauggugcuugacggaaccau

SEQ ID NO: 31562 - RNA, 21 nt, Homo sapiens
acccaguagccagauguagcu

SEQ ID NO: 31563 - RNA, 22 nt, Homo sapiens
aggaucuacacuggcuacugag

SEQ ID NO: 31564 - RNA, 22 nt, Homo sapiens
guaccccuggagauucugauaa

SEQ ID NO: 31565 - RNA, 23 nt, Homo sapiens
gcgcccaauuaaugucuguugau

SEQ ID NO: 31566 - RNA, 21 nt, Homo sapiens
auagcagcgccucacguuuug

SEQ ID NO: 31567 - RNA, 22 nt, Homo sapiens
uucaaaacaugaauugcugcug

SEQ ID NO: 31568 - RNA, 18 nt, Homo sapiens
augacaccucccugugaa

SEQ ID NO: 31569 - RNA, 20 nt, Homo sapiens
gcuccccauucucucuccgc

SEQ ID NO: 31570 - RNA, 21 nt, Homo sapiens
ccaccgccggagacucgcagg

SEQ ID NO: 31571 - RNA, 21 nt, Homo sapiens
gggggcagcaggcccuagccc

SEQ ID NO: 31572 - RNA, 19 nt, Homo sapiens
gccuuggccggcagcagaa

SEQ ID NO: 31573 - RNA, 22 nt, Homo sapiens
cuaaggugcagugugaugagga

SEQ ID NO: 31574 - RNA, 20 nt, Homo sapiens
guagcugauaacucacuacc

SEQ ID NO: 31575 - RNA, 20 nt, Homo sapiens
ccaccuagccucugaauauc

SEQ ID NO: 31576 - RNA, 21 nt, Homo sapiens
caccaaugccgccugggccgu

SEQ ID NO: 31577 - RNA, 21 nt, Homo sapiens
ccaccucuccucugucaugcu

SEQ ID NO: 31578 - RNA, 21 nt, Homo sapiens
gaaggccguacagcucuuccc

SEQ ID NO: 31579 - RNA, 19 nt, Homo sapiens
ccacagcuagcucaggcgg

SEQ ID NO: 31580 - RNA, 24 nt, Homo sapiens
cagcuaguugguccaagcuuccaa

SEQ ID NO: 31581 - RNA, 19 nt, Homo sapiens
cgggaacgcccgcacuaga

SEQ ID NO: 31582 - RNA, 24 nt, Homo sapiens
ggcgccuuggccggcacugcuccu

SEQ ID NO: 31583 - RNA, 19 nt, Homo sapiens
ggaucaaccagacguauuc

SEQ ID NO: 31584 - RNA, 20 nt, Homo sapiens
cccacagccucugauauaag

SEQ ID NO: 31585 - RNA, 20 nt, Homo sapiens
ccggccaccgacuggcggaa

SEQ ID NO: 31586 - RNA, 19 nt, Homo sapiens
ugugcucccccagccccuu

SEQ ID NO: 31587 - RNA, 23 nt, Homo sapiens
agcauugcaaccgaucccaaccu

SEQ ID NO: 31588 - RNA, 22 nt, Homo sapiens
guaaugcaacaaauccccaccc

SEQ ID NO: 31589 - RNA, 22 nt, Homo sapiens
acaggccgggacaagugcaaua

SEQ ID NO: 31590 - RNA, 22 nt, Homo sapiens
ggaggccgggacgagugcaaua

SEQ ID NO: 31591 - RNA, 22 nt, Homo sapiens
cacugcaccgcgucccgucccu

SEQ ID NO: 31592 - RNA, 21 nt, Homo sapiens
ggaaaucccuggcaaugugau

SEQ ID NO: 31593 - RNA, 22 nt, Homo sapiens
aaaucccauccccaggaacccc

SEQ ID NO: 31594 - RNA, 22 nt, Homo sapiens
cuacaagugccuucacugcagu

SEQ ID NO: 31595 - RNA, 23 nt, Homo sapiens
gaaacccagcagacaauguagcu

SEQ ID NO: 31596 - RNA, 22 nt, Homo sapiens
aaaucuacauuguaugccaggu

SEQ ID NO: 31597 - RNA, 22 nt, Homo sapiens
cgcauuauuacucacgguacga

SEQ ID NO: 31598 - RNA, 21 nt, Homo sapiens
cgcguaccaaaaguaauaaug

SEQ ID NO: 31599 - RNA, 23 nt, Homo sapiens
caugagugacgcccucuggagua

SEQ ID NO: 31600 - RNA, 21 nt, Homo sapiens
cugcugggccacaacguggga

SEQ ID NO: 31601 - RNA, 23 nt, Homo sapiens
ugcaggcagaagggguggugagg

SEQ ID NO: 31602 - RNA, 24 nt, Homo sapiens
ugucagccccacuucugccugcag

SEQ ID NO: 31603 - RNA, 21 nt, Homo sapiens
ccacaggcacgacugguuugg

SEQ ID NO: 31604 - RNA, 22 nt, Homo sapiens
ccacaggcacagccgguuugag

SEQ ID NO: 31605 - RNA, 21 nt, Homo sapiens
ugccaaaccagucgugccugu

SEQ ID NO: 31606 - RNA, 22 nt, Homo sapiens
gcagaggaauggagaguucgga

SEQ ID NO: 31607 - RNA, 20 nt, Homo sapiens
ggcccuuacccccauuccca

SEQ ID NO: 31608 - RNA, 22 nt, Homo sapiens
ucucuacauccccacaucgccu

SEQ ID NO: 31609 - RNA, 21 nt, Homo sapiens
ucauaagcccucugaccacua

SEQ ID NO: 31610 - RNA, 22 nt, Homo sapiens
caggagaaucacugaugucaga

SEQ ID NO: 31611 - RNA, 22 nt, Homo sapiens
ucuaccaguuccugcaggcgcg

SEQ ID NO: 31612 - RNA, 23 nt, Homo sapiens
cuccuacaauaagccccugccca

SEQ ID NO: 31613 - RNA, 22 nt, Homo sapiens
ccuggcccacccgaccccugca

SEQ ID NO: 31614 - RNA, 20 nt, Homo sapiens
gcauguggucgggugcgccu

SEQ ID NO: 31615 - RNA, 22 nt, Homo sapiens
gccccgacguuacucggacuau

SEQ ID NO: 31616 - RNA, 23 nt, Homo sapiens
ccccacgcccgccgcgggcccag

SEQ ID NO: 31617 - RNA, 21 nt, Homo sapiens
caacugaugccuuuccaagua

SEQ ID NO: 31618 - RNA, 22 nt, Homo sapiens
ucaguggcucagguucguugca

SEQ ID NO: 31619 - RNA, 22 nt, Homo sapiens
ucaaugacucagguaaguugca

SEQ ID NO: 31620 - RNA, 21 nt, Homo sapiens
cuacgcagaaaggacacagug

SEQ ID NO: 31621 - RNA, 22 nt, Homo sapiens
ucuacccagaaaggagccagug

SEQ ID NO: 31622 - RNA, 22 nt, Homo sapiens
uccacucagaaaggaaacagug

SEQ ID NO: 31623 - RNA, 21 nt, Homo sapiens
ugacuggcaccuuucugaaua

SEQ ID NO: 31624 - RNA, 20 nt, Homo sapiens
uaugaacaauuucuaggaau

SEQ ID NO: 31625 - RNA, 22 nt, Homo sapiens
acgguuuuaccagacaguauua

SEQ ID NO: 31626 - RNA, 22 nt, Homo sapiens
gagguuucccguguauguuuca

SEQ ID NO: 31627 - RNA, 22 nt, Homo sapiens
gggaaggcaguagguuguauag

SEQ ID NO: 31628 - RNA, 22 nt, Homo sapiens
aaccacacaaccuacuaccuca

SEQ ID NO: 31629 - RNA, 22 nt, Homo sapiens
acaucguuaccagacaguguua

SEQ ID NO: 31630 - RNA, 22 nt, Homo sapiens
uccagcacuguccgguaagaug

SEQ ID NO: 31631 - RNA, 22 nt, Homo sapiens
ucaucauuaccaggcaguauua

SEQ ID NO: 31632 - RNA, 22 nt, Homo sapiens
uccaaugcugcccaguaagaug

SEQ ID NO: 31633 - RNA, 23 nt, Homo sapiens
uccaucauuacccggcaguauua

SEQ ID NO: 31634 - RNA, 22 nt, Homo sapiens
ccaaacacugcuggguaagacg

SEQ ID NO: 31635 - RNA, 22 nt, Homo sapiens
caacaaaaucacugaugcugga

SEQ ID NO: 31636 - RNA, 20 nt, Homo sapiens
aguacaucaucuauacugua

SEQ ID NO: 31637 - RNA, 22 nt, Homo sapiens
cuuacaguauaugaugauaucc

SEQ ID NO: 31638 - RNA, 21 nt, Homo sapiens
auccuguacugagcugccccg

SEQ ID NO: 31639 - RNA, 21 nt, Homo sapiens
cugggggacggagcagaagga

SEQ ID NO: 31640 - RNA, 21 nt, Homo sapiens
cgcgcuucggccccgcccccg

SEQ ID NO: 31641 - RNA, 21 nt, Homo sapiens
gggcaucugggacgcgcagga

SEQ ID NO: 31642 - RNA, 22 nt, Homo sapiens
cuagccuccaugaauucugaug

SEQ ID NO: 31643 - RNA, 22 nt, Homo sapiens
uccaucaggagucauggaagcu

SEQ ID NO: 31644 - RNA, 21 nt, Homo sapiens
gagccaggcagggcgcuguca

SEQ ID NO: 31645 - RNA, 24 nt, Homo sapiens
gacuggcagcgcucagcccgcgcu

SEQ ID NO: 31646 - RNA, 22 nt, Homo sapiens
accacgauaucacaccucccag

SEQ ID NO: 31647 - RNA, 22 nt, Homo sapiens
ucccaggaaccaugauaucaca

SEQ ID NO: 31648 - RNA, 22 nt, Homo sapiens
ugugagccagccuggagcaccu

SEQ ID NO: 31649 - RNA, 22 nt, Homo sapiens
aaacagucuaccuacauugcuc

SEQ ID NO: 31650 - RNA, 22 nt, Homo sapiens
agacugcaggcccuagaggaca

SEQ ID NO: 31651 - RNA, 20 nt, Homo sapiens
ugucuugguuuuaugccuuu

SEQ ID NO: 31652 - RNA, 21 nt, Homo sapiens
acauguccauauuaugcguua

SEQ ID NO: 31653 - RNA, 22 nt, Homo sapiens
aauaagaccaucuuuuccucaa

SEQ ID NO: 31654 - RNA, 26 nt, Homo sapiens
cugagaaccagccauuucuuccucuu

SEQ ID NO: 31655 - RNA, 20 nt, Homo sapiens
cccaccugcucaguccgagc

SEQ ID NO: 31656 - RNA, 21 nt, Homo sapiens
agucuccaucugcggcccugu

SEQ ID NO: 31657 - RNA, 21 nt, Homo sapiens
acugaguccuuuguucucugc

SEQ ID NO: 31658 - RNA, 22 nt, Homo sapiens
ucagagaguuaagauaaucagu

SEQ ID NO: 31659 - RNA, 23 nt, Homo sapiens
acaaggcauaugguacucagaga

SEQ ID NO: 31660 - RNA, 22 nt, Homo sapiens
cccuaauccaacauuacuaguu

SEQ ID NO: 31661 - RNA, 22 nt, Homo sapiens
aguagcagucacauauacauau

SEQ ID NO: 31662 - RNA, 21 nt, Homo sapiens
ucucugccugcuuuuuggcca

SEQ ID NO: 31663 - RNA, 22 nt, Homo sapiens
gccgaagcuccaagguuccucc

SEQ ID NO: 31664 - RNA, 23 nt, Homo sapiens
aguggucuacucacaucagccuc

SEQ ID NO: 31665 - RNA, 21 nt, Homo sapiens
aacucaacaaccuuaggacag

SEQ ID NO: 31666 - RNA, 21 nt, Homo sapiens
ugcaaguccugagguugaaga

SEQ ID NO: 31667 - RNA, 22 nt, Homo sapiens
ucccaggaaccaugauaucaca

SEQ ID NO: 31668 - RNA, 22 nt, Homo sapiens
accacaauaucacaccucccag

SEQ ID NO: 31669 - RNA, 22 nt, Homo sapiens
augccuaucaaauaucuaccug

SEQ ID NO: 31670 - RNA, 21 nt, Homo sapiens
acaggcagauaugugauaggc

SEQ ID NO: 31671 - RNA, 20 nt, Homo sapiens
accuccccgcgccccagccc

SEQ ID NO: 31672 - RNA, 18 nt, Homo sapiens
acccucugaaaggaagca

SEQ ID NO: 31673 - RNA, 21 nt, Homo sapiens
cucacucagauggccaacuca

SEQ ID NO: 31674 - RNA, 23 nt, Homo sapiens
acccaccgacaacaaugaauguu

SEQ ID NO: 31675 - RNA, 21 nt, Homo sapiens
aaagagaccgguucacuguga

SEQ ID NO: 31676 - RNA, 22 nt, Homo sapiens
uauggcagacugugauuuguug

SEQ ID NO: 31677 - RNA, 21 nt, Homo sapiens
uugcauucauuguucagugag

SEQ ID NO: 31678 - RNA, 23 nt, Homo sapiens
acccaccgacagcaaugaauguu

SEQ ID NO: 31679 - RNA, 22 nt, Homo sapiens
gguacaaucaacggucgauggu

SEQ ID NO: 31680 - RNA, 23 nt, Homo sapiens
acucaccgacagcguugaauguu

SEQ ID NO: 31681 - RNA, 22 nt, Homo sapiens
gguacagucaacggucaguggu

SEQ ID NO: 31682 - RNA, 22 nt, Homo sapiens
agguugagguuaguggcaacag

SEQ ID NO: 31683 - RNA, 22 nt, Homo sapiens
acaagcuuuuugcucgucuuau

SEQ ID NO: 31684 - RNA, 22 nt, Homo sapiens
acaaaccuuuuguucgucuuau

SEQ ID NO: 31685 - RNA, 21 nt, Homo sapiens
gcacagcccccgucccucccu

SEQ ID NO: 31686 - RNA, 23 nt, Homo sapiens
gggagugaagacacggagccaga

SEQ ID NO: 31687 - RNA, 22 nt, Homo sapiens
auacauacuucuuuacauucca

SEQ ID NO: 31688 - RNA, 22 nt, Homo sapiens
agcacagacuugcugugauguu

SEQ ID NO: 31689 - RNA, 21 nt, Homo sapiens
aaacaucacugcaagucuuaa

SEQ ID NO: 31690 - RNA, 22 nt, Homo sapiens
uguuaagacuugcagugauguu

SEQ ID NO: 31691 - RNA, 21 nt, Homo sapiens
ugaacaucacagcaagucugu

SEQ ID NO: 31692 - RNA, 22 nt, Homo sapiens
aacucaguaaugguaacgguuu

SEQ ID NO: 31693 - RNA, 22 nt, Homo sapiens
aaugguaaugguucucuugcua

SEQ ID NO: 31694 - RNA, 23 nt, Homo sapiens
aaagucucgcucucugccccuca

SEQ ID NO: 31695 - RNA, 22 nt, Homo sapiens
cagacccauagaagcgagcuug

SEQ ID NO: 31696 - RNA, 22 nt, Homo sapiens
cacaagaucggaucuacggguu

SEQ ID NO: 31697 - RNA, 22 nt, Homo sapiens
cggacccacagacacgagcuug

SEQ ID NO: 31698 - RNA, 22 nt, Homo sapiens
cgcaaggucgguucuacgggug

SEQ ID NO: 31699 - RNA, 23 nt, Homo sapiens
acuccaacagggccgcgucucca

SEQ ID NO: 31700 - RNA, 23 nt, Homo sapiens
acuggagacacgugcacuguaga

SEQ ID NO: 31701 - RNA, 22 nt, Homo sapiens
uauuccccuagauacgaauuug

SEQ ID NO: 31702 - RNA, 23 nt, Homo sapiens
cacaaauucggaucuacagggua

SEQ ID NO: 31703 - RNA, 23 nt, Homo sapiens
ggaagccaucaagucgcugcagg

SEQ ID NO: 31704 - RNA, 22 nt, Homo sapiens
acaaaguucuguagugcacuga

SEQ ID NO: 31705 - RNA, 22 nt, Homo sapiens
agucggagugucucagaacuuu

SEQ ID NO: 31706 - RNA, 22 nt, Homo sapiens
gagccaaguaauggagaacagg

SEQ ID NO: 31707 - RNA, 21 nt, Homo sapiens
accuauccugaauuacuugaa

SEQ ID NO: 31708 - RNA, 22 nt, Homo sapiens
cuccagaccccucguucagggc

SEQ ID NO: 31709 - RNA, 22 nt, Homo sapiens
gagcccuggacuaggagucagc

SEQ ID NO: 31710 - RNA, 22 nt, Homo sapiens
acaaaaguugccuuugugugau

SEQ ID NO: 31711 - RNA, 22 nt, Homo sapiens
gaauucaccaagggcaaccucu

SEQ ID NO: 31712 - RNA, 21 nt, Homo sapiens
accauagaaggaaaaucuacc

SEQ ID NO: 31713 - RNA, 21 nt, Homo sapiens
acguggauuuuccucuaugau

SEQ ID NO: 31714 - RNA, 22 nt, Homo sapiens
uacucauagaaggagaaucuac

SEQ ID NO: 31715 - RNA, 22 nt, Homo sapiens
cugucccccaggccuguaccag

SEQ ID NO: 31716 - RNA, 22 nt, Homo sapiens
cacugguacaaggguugggaga

SEQ ID NO: 31717 - RNA, 22 nt, Homo sapiens
agcucccaagagccuaacccgu

SEQ ID NO: 31718 - RNA, 22 nt, Homo sapiens
gucccaagagccugacuuguga

SEQ ID NO: 31719 - RNA, 22 nt, Homo sapiens
cacaaguucggaucuacggguu

SEQ ID NO: 31720 - RNA, 21 nt, Homo sapiens
gcaaggcaguggccuguacag

SEQ ID NO: 31721 - RNA, 22 nt, Homo sapiens
aacuguacaaacuacuaccuca

SEQ ID NO: 31722 - RNA, 22 nt, Homo sapiens
ucacaaguuagggucucaggga

SEQ ID NO: 31723 - RNA, 22 nt, Homo sapiens
cauaccuauagauacaagcuug

SEQ ID NO: 31724 - RNA, 23 nt, Homo sapiens
acgcucaaaugucgcagcacuuu

SEQ ID NO: 31725 - RNA, 22 nt, Homo sapiens
agagcaagaccccgucucuaaa

SEQ ID NO: 31726 - RNA, 24 nt, Homo sapiens
acugcuggucuucagucagggcca

SEQ ID NO: 31727 - RNA, 21 nt, Homo sapiens
cugaaaccaaguaugggucgc

SEQ ID NO: 31728 - RNA, 22 nt, Homo sapiens
ggucucacccacgcuugauuuc

SEQ ID NO: 31729 - RNA, 21 nt, Homo sapiens
cuggggagcagaggcccaggg

SEQ ID NO: 31730 - RNA, 24 nt, Homo sapiens
cacccccagagccucagcucccca

SEQ ID NO: 31731 - RNA, 20 nt, Homo sapiens
uacugcuuccacagcucccc

SEQ ID NO: 31732 - RNA, 25 nt, Homo sapiens
gaauccugguucugucccucacuag

SEQ ID NO: 31733 - RNA, 20 nt, Homo sapiens
gcaagacaucacaagacucu

SEQ ID NO: 31734 - RNA, 23 nt, Homo sapiens
gacguaguccuauucucugcugc

SEQ ID NO: 31735 - RNA, 23 nt, Homo sapiens
cggcucugucgucgaggcgcuca

SEQ ID NO: 31736 - RNA, 23 nt, Homo sapiens
cgugagcuccuggaggacaggga

SEQ ID NO: 31737 - RNA, 22 nt, Homo sapiens
ggaaagcuaggaggccguauag

SEQ ID NO: 31738 - RNA, 22 nt, Homo sapiens
aacuauacaaccuccuaccuca

SEQ ID NO: 31739 - RNA, 22 nt, Homo sapiens
agcaaggcaguagcuugcgcag

SEQ ID NO: 31740 - RNA, 22 nt, Homo sapiens
aacagcacaaacuacuaccuca

SEQ ID NO: 31741 - RNA, 22 nt, Homo sapiens
ccagaacugaguccacagggca

SEQ ID NO: 31742 - RNA, 21 nt, Homo sapiens
uaguuggcaagucuagaacca

SEQ ID NO: 31743 - RNA, 23 nt, Homo sapiens
agaggcaggcaugcgggcagaca

SEQ ID NO: 31744 - RNA, 22 nt, Homo sapiens
accaaagaccgcaauuacuuuu

SEQ ID NO: 31745 - RNA, 18 nt, Homo sapiens
agacugugagcuccucga

SEQ ID NO: 31746 - RNA, 22 nt, Homo sapiens
gggaaggcaauagauuguauag

SEQ ID NO: 31747 - RNA, 22 nt, Homo sapiens
ggaaagacaguagacuguauag

SEQ ID NO: 31748 - RNA, 22 nt, Homo sapiens
aacuauacaaucuacuaccuca

SEQ ID NO: 31749 - RNA, 22 nt, Homo sapiens
ggccaaaaccacaauuacuuuu

SEQ ID NO: 31750 - RNA, 22 nt, Homo sapiens
ggcaaaaaccgcaauuacuuuu

SEQ ID NO: 31751 - RNA, 22 nt, Homo sapiens
cugaagaacugaauuucagagg

SEQ ID NO: 31752 - RNA, 22 nt, Homo sapiens
aacccauggaauucaguucuca

SEQ ID NO: 31753 - RNA, 22 nt, Homo sapiens
acugccugucugugccugcugu

SEQ ID NO: 31754 - RNA, 22 nt, Homo sapiens
gcacagcaaguguagacaggca

SEQ ID NO: 31755 - RNA, 22 nt, Homo sapiens
uaaccgauuucagauggugcua

SEQ ID NO: 31756 - RNA, 22 nt, Homo sapiens
cugaacaccaaaagaaaucagu

SEQ ID NO: 31757 - RNA, 24 nt, Homo sapiens
ucuaaaccaccauaugaaaccagc

SEQ ID NO: 31758 - RNA, 22 nt, Homo sapiens
cuaagccaccaugugaaaccag

SEQ ID NO: 31759 - RNA, 23 nt, Homo sapiens
aacacugauuucaaauggugcua

SEQ ID NO: 31760 - RNA, 22 nt, Homo sapiens
uaaccgauuucaaauggugcua

SEQ ID NO: 31761 - RNA, 22 nt, Homo sapiens
gaacaccaggagaaaucgguca

SEQ ID NO: 31762 - RNA, 23 nt, Homo sapiens
guagugggccgagccgagugaca

SEQ ID NO: 31763 - RNA, 22 nt, Homo sapiens
cugugaccuauggaauuggcag

SEQ ID NO: 31764 - RNA, 21 nt, Homo sapiens
ggcugucaauucauaggucag

SEQ ID NO: 31765 - RNA, 20 nt, Homo sapiens
ccagcagcaccuggggcagu

SEQ ID NO: 31766 - RNA, 22 nt, Homo sapiens
uauuuagugugauaauggcguu

SEQ ID NO: 31767 - RNA, 22 nt, Homo sapiens
gcugcaaacauccgacugaaag

SEQ ID NO: 31768 - RNA, 22 nt, Homo sapiens
uacagauggauaccgugcaauu

SEQ ID NO: 31769 - RNA, 22 nt, Homo sapiens
aaauugcaucgugauccacccg

SEQ ID NO: 31770 - RNA, 22 nt, Homo sapiens
gaaguaaacauccaccucccag

SEQ ID NO: 31771 - RNA, 22 nt, Homo sapiens
agcugaguguaggauguuuaca

SEQ ID NO: 31772 - RNA, 22 nt, Homo sapiens
ggaguaaacaacccucucccag

SEQ ID NO: 31773 - RNA, 22 nt, Homo sapiens
agaguaaacagccuucucccag

SEQ ID NO: 31774 - RNA, 23 nt, Homo sapiens
gcugagaguguaggauguuuaca

SEQ ID NO: 31775 - RNA, 22 nt, Homo sapiens
ggucaggagcaauaaugaaaaa

SEQ ID NO: 31776 - RNA, 23 nt, Homo sapiens
acauuuuucguuauugcucuuga

SEQ ID NO: 31777 - RNA, 23 nt, Homo sapiens
cuaccugcacuguaagcacuuug

SEQ ID NO: 31778 - RNA, 22 nt, Homo sapiens
agaacaguauuuccaggaaucc

SEQ ID NO: 31779 - RNA, 23 nt, Homo sapiens
agggauuccugggaaaacuggac

SEQ ID NO: 31780 - RNA, 22 nt, Homo sapiens
cuuuaagugcucauaaugcagu

SEQ ID NO: 31781 - RNA, 23 nt, Homo sapiens
cuaccugcacuauaagcacuuua

SEQ ID NO: 31782 - RNA, 22 nt, Homo sapiens
ggagagccuccacccaacccuc

SEQ ID NO: 31783 - RNA, 22 nt, Homo sapiens
ucagccgcugucacacgcacag

SEQ ID NO: 31784 - RNA, 22 nt, Homo sapiens
cagauaacagcagccccacugg

SEQ ID NO: 31785 - RNA, 22 nt, Homo sapiens
uccacauggaguugcuguuaca

SEQ ID NO: 31786 - RNA, 22 nt, Homo sapiens
auaaucccagagaccacuguga

SEQ ID NO: 31787 - RNA, 22 nt, Homo sapiens
ucacaguugccagcugagauua

SEQ ID NO: 31788 - RNA, 22 nt, Homo sapiens
gggcugcacugccgaggcacug

SEQ ID NO: 31789 - RNA, 20 nt, Homo sapiens
gcaaugcaacagcaaugcac

SEQ ID NO: 31790 - RNA, 19 nt, Homo sapiens
uucugccuccaaguccagu

SEQ ID NO: 31791 - RNA, 25 nt, Homo sapiens
ccacucuucugacuccaaguccagu

SEQ ID NO: 31792 - RNA, 20 nt, Homo sapiens
uuucugacuccaaguccagu

SEQ ID NO: 31793 - RNA, 19 nt, Homo sapiens
uccugacuccaaguccagu

SEQ ID NO: 31794 - RNA, 20 nt, Homo sapiens
cuucuggcuccaaguccagu

SEQ ID NO: 31795 - RNA, 20 nt, Homo sapiens
cuucugacuccaagcccagu

SEQ ID NO: 31796 - RNA, 21 nt, Homo sapiens
ccaucugacaccaaguccagu

SEQ ID NO: 31797 - RNA, 21 nt, Homo sapiens
ccuucugacuccuaguccagu

SEQ ID NO: 31798 - RNA, 19 nt, Homo sapiens
uucuggcuccaaauccagu

SEQ ID NO: 31799 - RNA, 20 nt, Homo sapiens
ggcaaagaaggaacauuccu

SEQ ID NO: 31800 - RNA, 21 nt, Homo sapiens
ccaaguucugucaugcacuga

SEQ ID NO: 31801 - RNA, 20 nt, Homo sapiens
ggggggcgaggcagguguga

SEQ ID NO: 31802 - RNA, 21 nt, Homo sapiens
cacacaccugcccccgcccac

SEQ ID NO: 31803 - RNA, 22 nt, Homo sapiens
ugaagaagggggggaagggcgu

SEQ ID NO: 31804 - RNA, 22 nt, Homo sapiens
augggacauccuacauaugcaa

SEQ ID NO: 31805 - RNA, 23 nt, Homo sapiens
agacaaggcccacccgugcaaac

SEQ ID NO: 31806 - RNA, 22 nt, Homo sapiens
ugagggggaaaguucuauaguc

SEQ ID NO: 31807 - RNA, 21 nt, Homo sapiens
ggacuauagaacuuucccccu

SEQ ID NO: 31808 - RNA, 21 nt, Homo sapiens
gcaagcccagaccgcaaaaag

SEQ ID NO: 31809 - RNA, 21 nt, Homo sapiens
acugaucuagagaacacaaga

SEQ ID NO: 31810 - RNA, 23 nt, Homo sapiens
gaacagguagucugaacacuggg

SEQ ID NO: 31811 - RNA, 22 nt, Homo sapiens
uaaccaaugugcagacuacugu

SEQ ID NO: 31812 - RNA, 22 nt, Homo sapiens
uaaccaaugugcagacuacugu

SEQ ID NO: 31813 - RNA, 23 nt, Homo sapiens
gaacagauagucuaaacacuggg

SEQ ID NO: 31814 - RNA, 22 nt, Homo sapiens
caaacaccauugucacacucca

SEQ ID NO: 31815 - RNA, 22 nt, Homo sapiens
gccagaaggggcauuuagggca

SEQ ID NO: 31816 - RNA, 23 nt, Homo sapiens
cuaacugcacuagaugcaccuua

SEQ ID NO: 31817 - RNA, 22 nt, Homo sapiens
gaagaaaggcaucauauaggag

SEQ ID NO: 31818 - RNA, 21 nt, Homo sapiens
aacuccuguaugaagccguuc

SEQ ID NO: 31819 - RNA, 22 nt, Homo sapiens
ccccucuggucaaccagucaca

SEQ ID NO: 31820 - RNA, 23 nt, Homo sapiens
ccagaaggagcacuuagggcagu

SEQ ID NO: 31821 - RNA, 23 nt, Homo sapiens
cuaucugcacuagaugcaccuua

SEQ ID NO: 31822 - RNA, 22 nt, Homo sapiens
augcccuuucaucauugcacug

SEQ ID NO: 31823 - RNA, 21 nt, Homo sapiens
guagugcaacagggaaagagu

SEQ ID NO: 31824 - RNA, 24 nt, Homo sapiens
agugugaguucuaccauugccaaa

SEQ ID NO: 31825 - RNA, 21 nt, Homo sapiens
acaggauugagggggggcccu

SEQ ID NO: 31826 - RNA, 22 nt, Homo sapiens
augcccuuuuaacauugcacug

SEQ ID NO: 31827 - RNA, 22 nt, Homo sapiens
gcagacaguagcacaaugugaa

SEQ ID NO: 31828 - RNA, 22 nt, Homo sapiens
agccaagcucagacggauccga

SEQ ID NO: 31829 - RNA, 22 nt, Homo sapiens
aucagagcccucugagcuucag

SEQ ID NO: 31830 - RNA, 22 nt, Homo sapiens
cuggagagacaaggggaagagg

SEQ ID NO: 31831 - RNA, 22 nt, Homo sapiens
uccccauuuccccugucacuca

SEQ ID NO: 31832 - RNA, 22 nt, Homo sapiens
uccaaguucagaaguguccuga

SEQ ID NO: 31833 - RNA, 22 nt, Homo sapiens
acucaggaacacuucugaacug

SEQ ID NO: 31834 - RNA, 21 nt, Homo sapiens
cugccaggauggaaagggaaa

SEQ ID NO: 31835 - RNA, 21 nt, Homo sapiens
uuccaccuccugcccuggcaa

SEQ ID NO: 31836 - RNA, 21 nt, Homo sapiens
accugauuucuaccaaucucu

SEQ ID NO: 31837 - RNA, 23 nt, Homo sapiens
cuccgguuuaaauggguccgauu

SEQ ID NO: 31838 - RNA, 24 nt, Homo sapiens
ccuguccauccgccugugcccaga

SEQ ID NO: 31839 - RNA, 21 nt, Homo sapiens
uggcuccagcucagucacugg

SEQ ID NO: 31840 - RNA, 22 nt, Homo sapiens
agcacuucauucuuccuauccu

SEQ ID NO: 31841 - RNA, 22 nt, Homo sapiens
accaccuggaauccacucuccu

SEQ ID NO: 31842 - RNA, 22 nt, Homo sapiens
acugggaugagguagaggagga

SEQ ID NO: 31843 - RNA, 22 nt, Homo sapiens
ccaucccauuccaaaccccuca

SEQ ID NO: 31844 - RNA, 21 nt, Homo sapiens
agcccccucagagaacuggau

SEQ ID NO: 31845 - RNA, 22 nt, Homo sapiens
ccauccaguugccuuagggguu

SEQ ID NO: 31846 - RNA, 21 nt, Homo sapiens
cugggagggagacgaggauga

SEQ ID NO: 31847 - RNA, 22 nt, Homo sapiens
cccaacccucguccccuucccu

SEQ ID NO: 31848 - RNA, 23 nt, Homo sapiens
auucgaugacucagucucuucuu

SEQ ID NO: 31849 - RNA, 23 nt, Homo sapiens
ucaagaaugaguuugugccauug

SEQ ID NO: 31850 - RNA, 21 nt, Homo sapiens
cugaggaaaagaggauucagu

SEQ ID NO: 31851 - RNA, 22 nt, Homo sapiens
uccacuucaaucccucauccca

SEQ ID NO: 31852 - RNA, 22 nt, Homo sapiens
ugaggcagcacaauauggccug

SEQ ID NO: 31853 - RNA, 22 nt, Homo sapiens
cacaaaccauuaugugcugcua

SEQ ID NO: 31854 - RNA, 22 nt, Homo sapiens
uagagcagcaaauaaugauucg

SEQ ID NO: 31855 - RNA, 22 nt, Homo sapiens
uguaaaccaugaugugcugcua

SEQ ID NO: 31856 - RNA, 22 nt, Homo sapiens
uaaagcagcacaguaauauugg

SEQ ID NO: 31857 - RNA, 22 nt, Homo sapiens
ggaucccugggaccauaccuag

SEQ ID NO: 31858 - RNA, 20 nt, Homo sapiens
gcagaagcauuuccacacac

SEQ ID NO: 31859 - RNA, 22 nt, Homo sapiens
uagcagaagcauuuccgcacac

SEQ ID NO: 31860 - RNA, 23 nt, Homo sapiens
ugauagcccuguacaaugcugcu

SEQ ID NO: 31861 - RNA, 22 nt, Homo sapiens
agcgggacuuugagggccaguu

SEQ ID NO: 31862 - RNA, 22 nt, Homo sapiens
ucaucucgcccucaaaaccccg

SEQ ID NO: 31863 - RNA, 21 nt, Homo sapiens
gcaccccuuugcugucccugc

SEQ ID NO: 31864 - RNA, 22 nt, Homo sapiens
aggcgaaggaugacaaagggaa

SEQ ID NO: 31865 - RNA, 23 nt, Homo sapiens
aaaauaacugcaguuuuggccau

SEQ ID NO: 31866 - RNA, 25 nt, Homo sapiens
uggugcaaaaguaauugugguuuuu

SEQ ID NO: 31867 - RNA, 21 nt, Homo sapiens
caaaaaccacgaucacuuuug

SEQ ID NO: 31868 - RNA, 23 nt, Homo sapiens
cgcaaaaguaauugcagucuuug

SEQ ID NO: 31869 - RNA, 23 nt, Homo sapiens
aggcaaaaaccgcaguuacuuuu

SEQ ID NO: 31870 - RNA, 22 nt, Homo sapiens
agucccuacuauguuccaggca

SEQ ID NO: 31871 - RNA, 21 nt, Homo sapiens
cuggcacuauaugaguccuau

SEQ ID NO: 31872 - RNA, 20 nt, Homo sapiens
auaugacucguauagugucu

SEQ ID NO: 31873 - RNA, 23 nt, Homo sapiens
agaauuuucauaaugcagucaca

SEQ ID NO: 31874 - RNA, 20 nt, Homo sapiens
gccaucaaaguuaaaagcca

SEQ ID NO: 31875 - RNA, 21 nt, Homo sapiens
ugccugucuacacuugcugug

SEQ ID NO: 31876 - RNA, 21 nt, Homo sapiens
uguacagcaggcacagacagg

SEQ ID NO: 31877 - RNA, 22 nt, Homo sapiens
uguccuuugccuacucuauuua

SEQ ID NO: 31878 - RNA, 22 nt, Homo sapiens
cuuaaauagaauaggcaaagga

SEQ ID NO: 31879 - RNA, 22 nt, Homo sapiens
aagaccguccucuugucccaac

SEQ ID NO: 31880 - RNA, 17 nt, Homo sapiens
gauuaaacaauucucug

SEQ ID NO: 31881 - RNA, 20 nt, Homo sapiens
ucucuccacagcuuccucua

SEQ ID NO: 31882 - RNA, 22 nt, Homo sapiens
ccagcaggccugcagaagggga

SEQ ID NO: 31883 - RNA, 23 nt, Homo sapiens
cuucccauuccacaagcccugau

SEQ ID NO: 31884 - RNA, 23 nt, Homo sapiens
augagaguuuuuuacuugccaga

SEQ ID NO: 31885 - RNA, 23 nt, Homo sapiens
aaggcccuuccaccaguccucga

SEQ ID NO: 31886 - RNA, 24 nt, Homo sapiens
uccucugagcuccuucucuaccca

SEQ ID NO: 31887 - RNA, 22 nt, Homo sapiens
auuggguuuuaagaguucuuua

SEQ ID NO: 31888 - RNA, 23 nt, Homo sapiens
aauauguagucuuuuauccauca

SEQ ID NO: 31889 - RNA, 22 nt, Homo sapiens
cacugcagucucagccuaggca

SEQ ID NO: 31890 - RNA, 22 nt, Homo sapiens
acuaacugaauagguugggcca

SEQ ID NO: 31891 - RNA, 23 nt, Homo sapiens
aaugacccuaccuauucagucag

SEQ ID NO: 31892 - RNA, 24 nt, Homo sapiens
accccauugcucccaggcuacaga

SEQ ID NO: 31893 - RNA, 23 nt, Homo sapiens
aacaggcaucuguugagcuccua

SEQ ID NO: 31894 - RNA, 19 nt, Homo sapiens
uccuccuccacccgcccuc

SEQ ID NO: 31895 - RNA, 25 nt, Homo sapiens
cgaaagaagcgcuuuacaauguuau

SEQ ID NO: 31896 - RNA, 24 nt, Homo sapiens
caauuccaaacacucaaaauaucu

SEQ ID NO: 31897 - RNA, 22 nt, Homo sapiens
ugaguuuugaguguuuggaguu

SEQ ID NO: 31898 - RNA, 22 nt, Homo sapiens
ccauucuuucuauccuagcaug

SEQ ID NO: 31899 - RNA, 24 nt, Homo sapiens
ucacacccuccucacugcccaacc

SEQ ID NO: 31900 - RNA, 22 nt, Homo sapiens
aagcacacaccaguuuuuucca

SEQ ID NO: 31901 - RNA, 22 nt, Homo sapiens
ccaaccucgaggaucuccccag

SEQ ID NO: 31902 - RNA, 22 nt, Homo sapiens
gcugaggagaucgucgagguug

SEQ ID NO: 31903 - RNA, 21 nt, Homo sapiens
ccaaccucgacgaucuccuca

SEQ ID NO: 31904 - RNA, 22 nt, Homo sapiens
gcuggggagauccucgagguug

SEQ ID NO: 31905 - RNA, 21 nt, Homo sapiens
accugaucccauugccccacc

SEQ ID NO: 31906 - RNA, 23 nt, Homo sapiens
aaaugucccuacucgcuuucccc

SEQ ID NO: 31907 - RNA, 22 nt, Homo sapiens
ucugcucccaacuccccuucug

SEQ ID NO: 31908 - RNA, 21 nt, Homo sapiens
aguucccacugcagagccugg

SEQ ID NO: 31909 - RNA, 21 nt, Homo sapiens
agaaagaucuggaagugggag

SEQ ID NO: 31910 - RNA, 22 nt, Homo sapiens
ugucucccacuuccagaucuuu

SEQ ID NO: 31911 - RNA, 22 nt, Homo sapiens
agcuucagcuagacuagggcag

SEQ ID NO: 31912 - RNA, 22 nt, Homo sapiens
agacugcacuagccuggcugaa

SEQ ID NO: 31913 - RNA, 22 nt, Homo sapiens
guggccgacacuuguaauccua

SEQ ID NO: 31914 - RNA, 22 nt, Homo sapiens
ugggcuuucuagucucagcucu

SEQ ID NO: 31915 - RNA, 22 nt, Homo sapiens
ggagagcugagacuagaaagcc

SEQ ID NO: 31916 - RNA, 23 nt, Homo sapiens
aucugggccucuguucuuaucag

SEQ ID NO: 31917 - RNA, 21 nt, Homo sapiens
uggggaguggagggguaggga

SEQ ID NO: 31918 - RNA, 23 nt, Homo sapiens
cuccccacccuucuacucccuaa

SEQ ID NO: 31919 - RNA, 22 nt, Homo sapiens
gucuuacugcccucauuuuaua

SEQ ID NO: 31920 - RNA, 22 nt, Homo sapiens
cgccauuucccuuaaagucaca

SEQ ID NO: 31921 - RNA, 22 nt, Homo sapiens
ugaggucacauugcauccaccu

SEQ ID NO: 31922 - RNA, 23 nt, Homo sapiens
uaggccaguaggcauugucugcg

SEQ ID NO: 31923 - RNA, 17 nt, Homo sapiens
gucugacuguagaacuc

SEQ ID NO: 31924 - RNA, 22 nt, Homo sapiens
cuaugugccaagcacaguccua

SEQ ID NO: 31925 - RNA, 22 nt, Homo sapiens
acugucugucucagaaccccag

SEQ ID NO: 31926 - RNA, 22 nt, Homo sapiens
uggccugccuauuuccuccuuu

SEQ ID NO: 31927 - RNA, 22 nt, Homo sapiens
aaaggagaaaacaggcagggca

SEQ ID NO: 31928 - RNA, 23 nt, Homo sapiens
ggcucugcaucucuaacucacua

SEQ ID NO: 31929 - RNA, 19 nt, Homo sapiens
ccgguagucccaggccagu

SEQ ID NO: 31930 - RNA, 21 nt, Homo sapiens
acguguccccagugccgugca

SEQ ID NO: 31931 - RNA, 23 nt, Homo sapiens
agcgccuggcacguguguacaca

SEQ ID NO: 31932 - RNA, 17 nt, Homo sapiens
cgauccggccgcgcccc

SEQ ID NO: 31933 - RNA, 22 nt, Homo sapiens
acguuuaaauuucaccccuucu

SEQ ID NO: 31934 - RNA, 19 nt, Homo sapiens
ccggcgccgagggcccgau

SEQ ID NO: 31935 - RNA, 17 nt, Homo sapiens
gacuacacuacagaagc

SEQ ID NO: 31936 - RNA, 22 nt, Homo sapiens
uccgagcgacuccgagagaggc

SEQ ID NO: 31937 - RNA, 23 nt, Homo sapiens
ugaggggcagagagcgagacuuu

SEQ ID NO: 31938 - RNA, 24 nt, Homo sapiens
aaaagcucggucugaggccccuca

SEQ ID NO: 31939 - RNA, 23 nt, Homo sapiens
ccgcagaccgaccgccuucuucu

SEQ ID NO: 31940 - RNA, 20 nt, Homo sapiens
ccgcgcagccccauggccaa

SEQ ID NO: 31941 - RNA, 23 nt, Homo sapiens
ccuucagccacacgcugcccagg

SEQ ID NO: 31942 - RNA, 23 nt, Homo sapiens
ccccguauccgcacaaagccucu

SEQ ID NO: 31943 - RNA, 21 nt, Homo sapiens
cuaccccaucagacccaaggg

SEQ ID NO: 31944 - RNA, 25 nt, Homo sapiens
uccuacccagggcacagauggggca

SEQ ID NO: 31945 - RNA, 23 nt, Homo sapiens
ucucuggccgucuaccuuccaca

SEQ ID NO: 31946 - RNA, 20 nt, Homo sapiens
uggggacguagcuggccaga

SEQ ID NO: 31947 - RNA, 23 nt, Homo sapiens
cugucuggccagcuacgucccca

SEQ ID NO: 31948 - RNA, 22 nt, Homo sapiens
uggaagguagacggccagagag

SEQ ID NO: 31949 - RNA, 23 nt, Homo sapiens
uuccacugcuacaaccucccaga

SEQ ID NO: 31950 - RNA, 22 nt, Homo sapiens
acuccucagauccuacgcagga

SEQ ID NO: 31951 - RNA, 22 nt, Homo sapiens
acugccagugagcagcagagcu

SEQ ID NO: 31952 - RNA, 21 nt, Homo sapiens
cagcccuccugguggcuggcc

SEQ ID NO: 31953 - RNA, 17 nt, Homo sapiens
aacccgggcccggcgcg

SEQ ID NO: 31954 - RNA, 23 nt, Homo sapiens
cgccuuuccgagccugcgccucc

SEQ ID NO: 31955 - RNA, 22 nt, Homo sapiens
ucuccauuccccaggacuccac

SEQ ID NO: 31956 - RNA, 23 nt, Homo sapiens
aacuuucuccuaaggcagucccu

SEQ ID NO: 31957 - RNA, 17 nt, Homo sapiens
auuuuucuucauauccc

SEQ ID NO: 31958 - RNA, 22 nt, Homo sapiens
auuaaagcucuucucccuucca

SEQ ID NO: 31959 - RNA, 22 nt, Homo sapiens
acuucacgggagugaggaaagu

SEQ ID NO: 31960 - RNA, 21 nt, Homo sapiens
gacuuugccuucgcccgcgaa

SEQ ID NO: 31961 - RNA, 22 nt, Homo sapiens
ucugugugacggaugccagaug

SEQ ID NO: 31962 - RNA, 22 nt, Homo sapiens
ugcuucuggcaucugucccuca

SEQ ID NO: 31963 - RNA, 22 nt, Homo sapiens
gcagcaguguagagauuaguuu

SEQ ID NO: 31964 - RNA, 22 nt, Homo sapiens
aaaccaaucucuacacuacugc

SEQ ID NO: 31965 - RNA, 21 nt, Homo sapiens
uuacccagucuccggugcagc

SEQ ID NO: 31966 - RNA, 21 nt, Homo sapiens
ggcugcaccggagacugggua

SEQ ID NO: 31967 - RNA, 24 nt, Homo sapiens
acucccucuaccucacuguccaca

SEQ ID NO: 31968 - RNA, 22 nt, Homo sapiens
acuaccugaauucccaaaagcu

SEQ ID NO: 31969 - RNA, 21 nt, Homo sapiens
aaagcuuuugguaauucaggu

SEQ ID NO: 31970 - RNA, 22 nt, Homo sapiens
uaaagagaccgaacagguauau

SEQ ID NO: 31971 - RNA, 22 nt, Homo sapiens
cuauauaucucuuugguccccu

SEQ ID NO: 31972 - RNA, 23 nt, Homo sapiens
auacacacacauauccauacaaa

SEQ ID NO: 31973 - RNA, 22 nt, Homo sapiens
uuauugccccuauucuaacaca

SEQ ID NO: 31974 - RNA, 22 nt, Homo sapiens
cuuguguuagaacagaggcaau

SEQ ID NO: 31975 - RNA, 22 nt, Homo sapiens
guccugcagagaggaagcccuu

SEQ ID NO: 31976 - RNA, 21 nt, Homo sapiens
gaagggcuuccucucugcagg

SEQ ID NO: 31977 - RNA, 22 nt, Homo sapiens
acaccaguauuucugaaauccu

SEQ ID NO: 31978 - RNA, 24 nt, Homo sapiens
gauauauacagauuccauacaucu

SEQ ID NO: 31979 - RNA, 22 nt, Homo sapiens
acgucacugcguucucuccccg

SEQ ID NO: 31980 - RNA, 19 nt, Homo sapiens
cuccggaagcuccgcccca

SEQ ID NO: 31981 - RNA, 21 nt, Homo sapiens
caaagccaucucuccgcguga

SEQ ID NO: 31982 - RNA, 22 nt, Homo sapiens
aagccacguagacagacgccug

SEQ ID NO: 31983 - RNA, 22 nt, Homo sapiens
cagaccugaguagcgcaaggug

SEQ ID NO: 31984 - RNA, 22 nt, Homo sapiens
accuugugcgccuucucagauu

SEQ ID NO: 31985 - RNA, 22 nt, Homo sapiens
ucugaagguucagaaaggccuu

SEQ ID NO: 31986 - RNA, 22 nt, Homo sapiens
gcugccguauaugugaugucac

SEQ ID NO: 31987 - RNA, 24 nt, Homo sapiens
ucugggaaccggcauuuguucuga

SEQ ID NO: 31988 - RNA, 22 nt, Homo sapiens
cucagagcagacgugguucuca

SEQ ID NO: 31989 - RNA, 17 nt, Homo sapiens
agaaagaagcaauauga

SEQ ID NO: 31990 - RNA, 22 nt, Homo sapiens
uuucaguuaucaaucugucaca

SEQ ID NO: 31991 - RNA, 23 nt, Homo sapiens
aaaaugcagauuccuggacucca

SEQ ID NO: 31992 - RNA, 22 nt, Homo sapiens
auacuuuuugggguaagggcuu

SEQ ID NO: 31993 - RNA, 22 nt, Homo sapiens
augcuuuuugggguaagggcuu

SEQ ID NO: 31994 - RNA, 22 nt, Homo sapiens
ccacacacuuccuuacauucca

SEQ ID NO: 31995 - RNA, 22 nt, Homo sapiens
aauuacaauacaaucugauaag

SEQ ID NO: 31996 - RNA, 22 nt, Homo sapiens
cacuuaucagguuguauuauaa

SEQ ID NO: 31997 - RNA, 22 nt, Homo sapiens
aaugauaauacaaccugcuaag

SEQ ID NO: 31998 - RNA, 22 nt, Homo sapiens
cacuuagcagguuguauuauau

SEQ ID NO: 31999 - RNA, 22 nt, Homo sapiens
auauaauacaaccugcuaagug

SEQ ID NO: 32000 - RNA, 22 nt, Homo sapiens
agcacuuagcagguuguauuau

SEQ ID NO: 32001 - RNA, 22 nt, Homo sapiens
cagcugguugaaggggaccaaa

SEQ ID NO: 32002 - RNA, 22 nt, Homo sapiens
uagcugguugaaggggaccaaa

SEQ ID NO: 32003 - RNA, 22 nt, Homo sapiens
cuuccagucaaggauguuuaca

SEQ ID NO: 32004 - RNA, 22 nt, Homo sapiens
ugggguauuugacaaacugaca

SEQ ID NO: 32005 - RNA, 22 nt, Homo sapiens
aacucagcuugucaaauacacg

SEQ ID NO: 32006 - RNA, 21 nt, Homo sapiens
gcggaacuuagccacugugaa

SEQ ID NO: 32007 - RNA, 22 nt, Homo sapiens
ugcucacaagcagcuaagcccu

SEQ ID NO: 32008 - RNA, 21 nt, Homo sapiens
gguaaucccuggcaaugugau

SEQ ID NO: 32009 - RNA, 22 nt, Homo sapiens
aaaucagcaugccaggaaccca

SEQ ID NO: 32010 - RNA, 22 nt, Homo sapiens
gcuguaaacauccgacugaaag

SEQ ID NO: 32011 - RNA, 22 nt, Homo sapiens
acugauaucagcucaguaggca

SEQ ID NO: 32012 - RNA, 22 nt, Homo sapiens
cuguguuucagcucaguaggca

SEQ ID NO: 32013 - RNA, 22 nt, Homo sapiens
cuguuccugcugaacugagcca

SEQ ID NO: 32014 - RNA, 21 nt, Homo sapiens
gcagaacuuagccacugugaa

SEQ ID NO: 32015 - RNA, 22 nt, Homo sapiens
guucaccaaucagcuaagcucu

SEQ ID NO: 32016 - RNA, 23 nt, Homo sapiens
uccauaaaguaggaaacacuaca

SEQ ID NO: 32017 - RNA, 21 nt, Homo sapiens
aguagugcuuucuacuuuaug

SEQ ID NO: 32018 - RNA, 22 nt, Homo sapiens
ccuggcacacaguagaccuuca

SEQ ID NO: 32019 - RNA, 22 nt, Homo sapiens
aaugaaagccuaccauguacaa

SEQ ID NO: 32020 - RNA, 21 nt, Homo sapiens
agacauggaggagccauccag

SEQ ID NO: 32021 - RNA, 23 nt, Homo sapiens
ccacccaaugaccuacuccaaga

SEQ ID NO: 32022 - RNA, 22 nt, Homo sapiens
cacuuacuucuuugcagaugag

SEQ ID NO: 32023 - RNA, 22 nt, Homo sapiens
ucaguuuccucugcaaacaguu

SEQ ID NO: 32024 - RNA, 22 nt, Homo sapiens
uggggacccucccugaaccaag

SEQ ID NO: 32025 - RNA, 22 nt, Homo sapiens
uccuugguucagggaagguccu

SEQ ID NO: 32026 - RNA, 21 nt, Homo sapiens
uaauccaugcacacaggaggu

SEQ ID NO: 32027 - RNA, 22 nt, Homo sapiens
caacuccgauaugcaaugggua

SEQ ID NO: 32028 - RNA, 18 nt, Homo sapiens
ccuucucaacccagcuuu

SEQ ID NO: 32029 - RNA, 20 nt, Homo sapiens
accauccccaaacggauacc

SEQ ID NO: 32030 - RNA, 22 nt, Homo sapiens
acaggggagcacugcugccuuc

SEQ ID NO: 32031 - RNA, 22 nt, Homo sapiens
acaaaguucugugaugcacuga

SEQ ID NO: 32032 - RNA, 22 nt, Homo sapiens
gccugaguguauaacagaacuu

SEQ ID NO: 32033 - RNA, 22 nt, Homo sapiens
acggaagggcagagagggccag

SEQ ID NO: 32034 - RNA, 21 nt, Homo sapiens
ccucaaggagcuucagucuag

SEQ ID NO: 32035 - RNA, 21 nt, Homo sapiens
acuagacugugagcuccucga

SEQ ID NO: 32036 - RNA, 21 nt, Homo sapiens
agaggucgaccguguaaugug

SEQ ID NO: 32037 - RNA, 22 nt, Homo sapiens
gcgaacgcgccacggaccaccu

SEQ ID NO: 32038 - RNA, 23 nt, Homo sapiens
acaccaaugcccuaggggaugcg

SEQ ID NO: 32039 - RNA, 20 nt, Homo sapiens
cuggaggaagggcccagagg

SEQ ID NO: 32040 - RNA, 23 nt, Homo sapiens
acacuuacuggacaccuacuagg

SEQ ID NO: 32041 - RNA, 21 nt, Homo sapiens
aaaggccacauccagcaccgu

SEQ ID NO: 32042 - RNA, 23 nt, Homo sapiens
cuccaacaauauccuggugcuga

SEQ ID NO: 32043 - RNA, 23 nt, Homo sapiens
uccagcaucagugauuuuguuga

SEQ ID NO: 32044 - RNA, 22 nt, Homo sapiens
cacucagcaccaggauauuguu

SEQ ID NO: 32045 - RNA, 23 nt, Homo sapiens
ccuagagagggugagaaccugcc

SEQ ID NO: 32046 - RNA, 23 nt, Homo sapiens
gggccgcagcugucgcccguguc

SEQ ID NO: 32047 - RNA, 21 nt, Homo sapiens
caugcacaugcacacauacau

SEQ ID NO: 32048 - RNA, 22 nt, Homo sapiens
agagagagucugcccuuguaua

SEQ ID NO: 32049 - RNA, 20 nt, Homo sapiens
cccccgccuccgccgccgcc

SEQ ID NO: 32050 - RNA, 22 nt, Homo sapiens
aggaggacaagugagcaccugc

SEQ ID NO: 32051 - RNA, 19 nt, Homo sapiens
ccgcccaccgccaggcccc

SEQ ID NO: 32052 - RNA, 22 nt, Homo sapiens
cccaaaaaauucaccuuugggc

SEQ ID NO: 32053 - RNA, 22 nt, Homo sapiens
agcccaaaaggagaauucuuug

SEQ ID NO: 32054 - RNA, 22 nt, Homo sapiens
guaagaagugcuuacauugcag

SEQ ID NO: 32055 - RNA, 23 nt, Homo sapiens
cuaccugcacuguaagcacuuuu

SEQ ID NO: 32056 - RNA, 22 nt, Homo sapiens
cuggaagugcccauacuacagu

SEQ ID NO: 32057 - RNA, 23 nt, Homo sapiens
cuaccugcacuaugagcacuuug

SEQ ID NO: 32058 - RNA, 23 nt, Homo sapiens
ccuggcagcggaaacaauacccc

SEQ ID NO: 32059 - RNA, 23 nt, Homo sapiens
cugcagaacuguucccgcugcua

SEQ ID NO: 32060 - RNA, 21 nt, Homo sapiens
aagucccuugcuugaggcucg

SEQ ID NO: 32061 - RNA, 22 nt, Homo sapiens
gaccgcuucaaggaagggacua

SEQ ID NO: 32062 - RNA, 21 nt, Homo sapiens
ccuucugacuccaaguccagu

SEQ ID NO: 32063 - RNA, 22 nt, Homo sapiens
acacaggaccuggagucaggag

SEQ ID NO: 32064 - RNA, 22 nt, Homo sapiens
ucacgcgagccgaacgaacaaa

SEQ ID NO: 32065 - RNA, 22 nt, Homo sapiens
uagcacaugcucaaacauccgu

SEQ ID NO: 32066 - RNA, 23 nt, Homo sapiens
accacaggagucugagcauuuga

SEQ ID NO: 32067 - RNA, 22 nt, Homo sapiens
cucaggcaguuucuuguugccg

SEQ ID NO: 32068 - RNA, 22 nt, Homo sapiens
cccaacaacaugaaacuaccua

SEQ ID NO: 32069 - RNA, 22 nt, Homo sapiens
gugaugcacuguggaaacauug

SEQ ID NO: 32070 - RNA, 21 nt, Homo sapiens
ugcaaugcaacuacaaugcac

SEQ ID NO: 32071 - RNA, 18 nt, Homo sapiens
ugguggcagaggugggau

SEQ ID NO: 32072 - RNA, 19 nt, Homo sapiens
augguggcaguggugggau

SEQ ID NO: 32073 - RNA, 22 nt, Homo sapiens
aaagacccauggagaggaaggu

SEQ ID NO: 32074 - RNA, 22 nt, Homo sapiens
accuucuccucaaugggucuuu

SEQ ID NO: 32075 - RNA, 21 nt, Homo sapiens
auuuugaucaaucucuacauu

SEQ ID NO: 32076 - RNA, 23 nt, Homo sapiens
uauauuccguauacauauuccgu

SEQ ID NO: 32077 - RNA, 24 nt, Homo sapiens
uagagaaggacagcugugagcucu

SEQ ID NO: 32078 - RNA, 22 nt, Homo sapiens
ugcagacuaguccuuauuugau

SEQ ID NO: 32079 - RNA, 23 nt, Homo sapiens
aagauguuuuacaugagucucau

SEQ ID NO: 32080 - RNA, 21 nt, Homo sapiens
uauuccguauauacauuccau

SEQ ID NO: 32081 - RNA, 22 nt, Homo sapiens
ggccaaucuuagguucuacaau

SEQ ID NO: 32082 - RNA, 22 nt, Homo sapiens
uugggggaguuccuuagagaug

SEQ ID NO: 32083 - RNA, 23 nt, Homo sapiens
gaaaucucuacagaagccccaua

SEQ ID NO: 32084 - RNA, 20 nt, Homo sapiens
aaagcgugggggaaacacgg

SEQ ID NO: 32085 - RNA, 15 nt, Homo sapiens
aacccaggaucuccu

SEQ ID NO: 32086 - RNA, 22 nt, Homo sapiens
ggccguggccagagcccacgag

SEQ ID NO: 32087 - RNA, 22 nt, Homo sapiens
cacugcagggcucuggccacug

SEQ ID NO: 32088 - RNA, 22 nt, Homo sapiens
ccgguccguacaaacucugcag

SEQ ID NO: 32089 - RNA, 20 nt, Homo sapiens
cacagcagaguuuguacgga

SEQ ID NO: 32090 - RNA, 22 nt, Homo sapiens
gaugaagauuacuggggggaag

SEQ ID NO: 32091 - RNA, 23 nt, Homo sapiens
uccccuucccugccauauccuca

SEQ ID NO: 32092 - RNA, 23 nt, Homo sapiens
ccuacucccagggucaugcaaaa

SEQ ID NO: 32093 - RNA, 22 nt, Homo sapiens
ugcacaauccugugagugaguc

SEQ ID NO: 32094 - RNA, 22 nt, Homo sapiens
aguaguggaugaagcacugugu

SEQ ID NO: 32095 - RNA, 22 nt, Homo sapiens
gcacagagugcaucauccacua

SEQ ID NO: 32096 - RNA, 21 nt, Homo sapiens
cuaccuccaccuguaucauca

SEQ ID NO: 32097 - RNA, 22 nt, Homo sapiens
augauaacacagguagaaguag

SEQ ID NO: 32098 - RNA, 22 nt, Homo sapiens
ugauacuacuuccaaugucgca

SEQ ID NO: 32099 - RNA, 21 nt, Homo sapiens
aaggacguguacuaggucuaa

SEQ ID NO: 32100 - RNA, 22 nt, Homo sapiens
agucuucagguaggguaggaaa

SEQ ID NO: 32101 - RNA, 22 nt, Homo sapiens
ucauuuacuuucucuuacagau

SEQ ID NO: 32102 - RNA, 24 nt, Homo sapiens
acgucgcacgaacgccuguccggg

SEQ ID NO: 32103 - RNA, 23 nt, Homo sapiens
cuuugucuacgcuggguccaggu

SEQ ID NO: 32104 - RNA, 22 nt, Homo sapiens
gagaggaugacgcagacuuggu

SEQ ID NO: 32105 - RNA, 23 nt, Homo sapiens
guaccgagucuccaucauccacu

SEQ ID NO: 32106 - RNA, 24 nt, Homo sapiens
acuucugcagugucaguguggaac

SEQ ID NO: 32107 - RNA, 24 nt, Homo sapiens
caguauccacuccugaccagcagg

SEQ ID NO: 32108 - RNA, 23 nt, Homo sapiens
gucacaucccucccaagacccuc

SEQ ID NO: 32109 - RNA, 22 nt, Homo sapiens
auaagagucucccccuguauau

SEQ ID NO: 32110 - RNA, 22 nt, Homo sapiens
augagagucucccccuguauau

SEQ ID NO: 32111 - RNA, 21 nt, Homo sapiens
aacauacaaaggguauccucu

SEQ ID NO: 32112 - RNA, 22 nt, Homo sapiens
agaaagcgcuuuccuuuguaga

SEQ ID NO: 32113 - RNA, 22 nt, Homo sapiens
agaaaaugccccucaguuuuga

SEQ ID NO: 32114 - RNA, 24 nt, Homo sapiens
cagaaagugcuuucuuuuggagaa

SEQ ID NO: 32115 - RNA, 23 nt, Homo sapiens
gaaagugcuucuuuccucgagaa

SEQ ID NO: 32116 - RNA, 22 nt, Homo sapiens
agacagugcuuccaucuagagg

SEQ ID NO: 32117 - RNA, 22 nt, Homo sapiens
acacucuaaagggaugcacgau

SEQ ID NO: 32118 - RNA, 22 nt, Homo sapiens
acacucuaaagggaugcacgau

SEQ ID NO: 32119 - RNA, 22 nt, Homo sapiens
acacucuaaaaggaugcacgau

SEQ ID NO: 32120 - RNA, 22 nt, Homo sapiens
accucuaaaggggagcgcuuug

SEQ ID NO: 32121 - RNA, 23 nt, Homo sapiens
acacucuaaagagaagcgcuuug

SEQ ID NO: 32122 - RNA, 23 nt, Homo sapiens
cagaaagugcuucccuccagaga

SEQ ID NO: 32123 - RNA, 21 nt, Homo sapiens
ccucuaaagagaagcgcuuuc

SEQ ID NO: 32124 - RNA, 22 nt, Homo sapiens
gagaaagugcuucccucuagag

SEQ ID NO: 32125 - RNA, 22 nt, Homo sapiens
acacucuaaaaggaugcacuuu

SEQ ID NO: 32126 - RNA, 22 nt, Homo sapiens
cagaaagcgcuucccucuagag

SEQ ID NO: 32127 - RNA, 22 nt, Homo sapiens
cacucuaaagggaggcacuuug

SEQ ID NO: 32128 - RNA, 22 nt, Homo sapiens
aacacucuaaaaggaggcacuu

SEQ ID NO: 32129 - RNA, 22 nt, Homo sapiens
gaaagugcucccuuuuggagaa

SEQ ID NO: 32130 - RNA, 22 nt, Homo sapiens
acaguccaaagggaagcacuuu

SEQ ID NO: 32131 - RNA, 21 nt, Homo sapiens
agaaaguacuucccucuggag

SEQ ID NO: 32132 - RNA, 22 nt, Homo sapiens
acucuaaagggaagcacuuugu

SEQ ID NO: 32133 - RNA, 22 nt, Homo sapiens
gagaaagugcuucccuuuguag

SEQ ID NO: 32134 - RNA, 22 nt, Homo sapiens
cgcucuaaagggaagcgccuuc

SEQ ID NO: 32135 - RNA, 21 nt, Homo sapiens
agaaagugcaucccucuggag

SEQ ID NO: 32136 - RNA, 22 nt, Homo sapiens
cagaaagugcuucccucuagag

SEQ ID NO: 32137 - RNA, 22 nt, Homo sapiens
gccucuaaaaggaagcacuuuc

SEQ ID NO: 32138 - RNA, 23 nt, Homo sapiens
acagaaagugcuucccucaagag

SEQ ID NO: 32139 - RNA, 22 nt, Homo sapiens
gccuucugacccuaaguccagu

SEQ ID NO: 32140 - RNA, 22 nt, Homo sapiens
aagaagugcaccauguuuguuu

SEQ ID NO: 32141 - RNA, 22 nt, Homo sapiens
cgaaaauaacaugggcaacuuc

SEQ ID NO: 32142 - RNA, 21 nt, Homo sapiens
aaguguuguccgugaaugauu

SEQ ID NO: 32143 - RNA, 22 nt, Homo sapiens
cgaauccaccacgaacaacuuc

SEQ ID NO: 32144 - RNA, 23 nt, Homo sapiens
cuagaggacagguaacacggagg

SEQ ID NO: 32145 - RNA, 23 nt, Homo sapiens
ggcuuccuugcuauccauccuca

SEQ ID NO: 32146 - RNA, 22 nt, Homo sapiens
agaggcaccgcugggaucugaa

SEQ ID NO: 32147 - RNA, 19 nt, Homo sapiens
cagaggagccuccuaggac

SEQ ID NO: 32148 - RNA, 21 nt, Homo sapiens
gggaggcuccuuugagaauug

SEQ ID NO: 32149 - RNA, 21 nt, Homo sapiens
agcagaccccugcaccccaac

SEQ ID NO: 32150 - RNA, 22 nt, Homo sapiens
acacacccacgcgagccggaaa

SEQ ID NO: 32151 - RNA, 23 nt, Homo sapiens
acacacucacacacacacacuca

SEQ ID NO: 32152 - RNA, 22 nt, Homo sapiens
ugccgugcccuggccucccacu

SEQ ID NO: 32153 - RNA, 20 nt, Homo sapiens
cugcgggaggacagggcuca

SEQ ID NO: 32154 - RNA, 23 nt, Homo sapiens
acacucaaaagauggcggcacuu

SEQ ID NO: 32155 - RNA, 20 nt, Homo sapiens
agugcccccacaguuugagu

SEQ ID NO: 32156 - RNA, 23 nt, Homo sapiens
gcacucaaacugugggggcacuu

SEQ ID NO: 32157 - RNA, 22 nt, Homo sapiens
aaagugccgccaucuuuugagu

SEQ ID NO: 32158 - RNA, 22 nt, Homo sapiens
gacucuugaacaacacagguuu

SEQ ID NO: 32159 - RNA, 22 nt, Homo sapiens
cugcgauuccucccucuacugu

SEQ ID NO: 32160 - RNA, 22 nt, Homo sapiens
cuagugguccuaaacauuucac

SEQ ID NO: 32161 - RNA, 23 nt, Homo sapiens
uccagugguucuuaacaguucaa

SEQ ID NO: 32162 - RNA, 22 nt, Homo sapiens
ugugaaauguuuaggaccacua

SEQ ID NO: 32163 - RNA, 21 nt, Homo sapiens
agggcucaucuugguccugca

SEQ ID NO: 32164 - RNA, 21 nt, Homo sapiens
ugcaaacccugcaugugggag

SEQ ID NO: 32165 - RNA, 21 nt, Homo sapiens
cccuccaccaugcaagggaug

SEQ ID NO: 32166 - RNA, 22 nt, Homo sapiens
ugggcugggcucauuucauuuu

SEQ ID NO: 32167 - RNA, 21 nt, Homo sapiens
cccucggcgauccccgcggcu

SEQ ID NO: 32168 - RNA, 19 nt, Homo sapiens
cuuagacacucaggucccu

SEQ ID NO: 32169 - RNA, 19 nt, Homo sapiens
ggacucuacagacacaccu

SEQ ID NO: 32170 - RNA, 24 nt, Homo sapiens
ucauguaccagcgaccgggcuaug

SEQ ID NO: 32171 - RNA, 18 nt, Homo sapiens
uccucacaccuccagccg

SEQ ID NO: 32172 - RNA, 18 nt, Homo sapiens
cuucagucaacuucuuag

SEQ ID NO: 32173 - RNA, 19 nt, Homo sapiens
uuccucagcuuguccaguc

SEQ ID NO: 32174 - RNA, 21 nt, Homo sapiens
agcaacaccgcagcgacaagc

SEQ ID NO: 32175 - RNA, 17 nt, Homo sapiens
ccacccccgcacccgcc

SEQ ID NO: 32176 - RNA, 21 nt, Homo sapiens
aaucaccaauaaugggacaca

SEQ ID NO: 32177 - RNA, 22 nt, Homo sapiens
aucuccaugguguuuucuuaaa

SEQ ID NO: 32178 - RNA, 22 nt, Homo sapiens
aacccuggugucgugaaauagc

SEQ ID NO: 32179 - RNA, 23 nt, Homo sapiens
cggccugauucacaacaccagcu

SEQ ID NO: 32180 - RNA, 21 nt, Homo sapiens
aaagaucaaccauguauuauu

SEQ ID NO: 32181 - RNA, 22 nt, Homo sapiens
gcgaauauaacacggucgaucu

SEQ ID NO: 32182 - RNA, 22 nt, Homo sapiens
cauauuggcacugcacaugauu

SEQ ID NO: 32183 - RNA, 23 nt, Homo sapiens
agcaaaaaugugcuagugccaaa

SEQ ID NO: 32184 - RNA, 22 nt, Homo sapiens
cucggggcagcucaguacagga

SEQ ID NO: 32185 - RNA, 22 nt, Homo sapiens
ggcccugguguugugaaguagc

SEQ ID NO: 32186 - RNA, 22 nt, Homo sapiens
agacucauuugagacgaugaug

SEQ ID NO: 32187 - RNA, 23 nt, Homo sapiens
uccaucaucaaaacaaauggagu

SEQ ID NO: 32188 - RNA, 22 nt, Homo sapiens
uguuaaugcuaauauguaggag

SEQ ID NO: 32189 - RNA, 23 nt, Homo sapiens
accccuaucacgauuagcauuaa

SEQ ID NO: 32190 - RNA, 22 nt, Homo sapiens
agccacaaucaccuucugaucu

SEQ ID NO: 32191 - RNA, 22 nt, Homo sapiens
caugauugccacgucugcagua

SEQ ID NO: 32192 - RNA, 21 nt, Homo sapiens
ccaagagauguuggcccuaac

SEQ ID NO: 32193 - RNA, 21 nt, Homo sapiens
acguggaauuuccucuauguu

SEQ ID NO: 32194 - RNA, 21 nt, Homo sapiens
aacauagaaggaauauccacc

SEQ ID NO: 32195 - RNA, 23 nt, Homo sapiens
agcagcauuguacagggcuauga

SEQ ID NO: 32196 - RNA, 22 nt, Homo sapiens
ccaucuuuaccagacaguguua

SEQ ID NO: 32197 - RNA, 22 nt, Homo sapiens
uccaacacuguacuggaagaug

SEQ ID NO: 32198 - RNA, 22 nt, Homo sapiens
acugggacuuuguaggccaguu

SEQ ID NO: 32199 - RNA, 22 nt, Homo sapiens
ucaucucgcccgcaaagaccca

SEQ ID NO: 32200 - RNA, 21 nt, Homo sapiens
gucugucaauucauaggucau

SEQ ID NO: 32201 - RNA, 22 nt, Homo sapiens
acaguucuucaacuggcagcuu

SEQ ID NO: 32202 - RNA, 22 nt, Homo sapiens
uaaagcuugccacugaagaacu

SEQ ID NO: 32203 - RNA, 22 nt, Homo sapiens
auuccccuagaaucgaaucugu

SEQ ID NO: 32204 - RNA, 23 nt, Homo sapiens
cacaaauucgguucuacagggua

SEQ ID NO: 32205 - RNA, 22 nt, Homo sapiens
cgccaauauuuacgugcugcua

SEQ ID NO: 32206 - RNA, 21 nt, Homo sapiens
gagcuacagugcuucaucuca

SEQ ID NO: 32207 - RNA, 22 nt, Homo sapiens
accagagaugcagcacugcacc

SEQ ID NO: 32208 - RNA, 21 nt, Homo sapiens
cuagggaagaacagugagcaa

SEQ ID NO: 32209 - RNA, 18 nt, Homo sapiens
caugcucagcugacccug

SEQ ID NO: 32210 - RNA, 21 nt, Homo sapiens
ccaaccaaugaaagaaugcuu

SEQ ID NO: 32211 - RNA, 21 nt, Homo sapiens
cggcucggguggcggcgacgg

SEQ ID NO: 32212 - RNA, 27 nt, Homo sapiens
ugcccacucucaccaucaccuacagug

SEQ ID NO: 32213 - RNA, 23 nt, Homo sapiens
gcacgucaccggucuaccauccc

SEQ ID NO: 32214 - RNA, 21 nt, Homo sapiens
agaaguagaccauguguccua

SEQ ID NO: 32215 - RNA, 22 nt, Homo sapiens
gaggcucagaauggcucaggag

SEQ ID NO: 32216 - RNA, 21 nt, Homo sapiens
cucccccacugcagcuggcac

SEQ ID NO: 32217 - RNA, 21 nt, Homo sapiens
gagcugcauccuggcuccggg

SEQ ID NO: 32218 - RNA, 21 nt, Homo sapiens
auaauggagaccaggccacga

SEQ ID NO: 32219 - RNA, 20 nt, Homo sapiens
cucaaagcaaacccugcaga

SEQ ID NO: 32220 - RNA, 21 nt, Homo sapiens
gcuuaaacaucuacaugaaca

SEQ ID NO: 32221 - RNA, 18 nt, Homo sapiens
gaaaugagggccagcuga

SEQ ID NO: 32222 - RNA, 21 nt, Homo sapiens
ccccucccagccucccugcca

SEQ ID NO: 32223 - RNA, 20 nt, Homo sapiens
uccgccugucugaacaguga

SEQ ID NO: 32224 - RNA, 21 nt, Homo sapiens
cugaggagagaggaggugggg

SEQ ID NO: 32225 - RNA, 19 nt, Homo sapiens
ccaccucccgaguccucac

SEQ ID NO: 32226 - RNA, 22 nt, Homo sapiens
cugggggcggcacaggggcuca

SEQ ID NO: 32227 - RNA, 22 nt, Homo sapiens
ccccccacugggccguacccac

SEQ ID NO: 32228 - RNA, 22 nt, Homo sapiens
cuagggaacacagggcugguga

SEQ ID NO: 32229 - RNA, 26 nt, Homo sapiens
ccccauccaggccugcaugcccucac

SEQ ID NO: 32230 - RNA, 23 nt, Homo sapiens
cugugggagggcaguggugagag

SEQ ID NO: 32231 - RNA, 24 nt, Homo sapiens
cgcucucccccaaacccuacccac

SEQ ID NO: 32232 - RNA, 20 nt, Homo sapiens
gcagcuguccgcccagacac

SEQ ID NO: 32233 - RNA, 20 nt, Homo sapiens
ggggcagacagacgaggaag

SEQ ID NO: 32234 - RNA, 23 nt, Homo sapiens
cacacacuggggcucccacucac

SEQ ID NO: 32235 - RNA, 27 nt, Homo sapiens
uuuagcacagugcuuauacaagaaggu

SEQ ID NO: 32236 - RNA, 22 nt, Homo sapiens
gacagggucucguuuugucgcc

SEQ ID NO: 32237 - RNA, 22 nt, Homo sapiens
uccacuuccuggguucaagcaa

SEQ ID NO: 32238 - RNA, 19 nt, Homo sapiens
cacugcaaccuccaucucc

SEQ ID NO: 32239 - RNA, 21 nt, Homo sapiens
cucaggcuggagugcaguggu

SEQ ID NO: 32240 - RNA, 22 nt, Homo sapiens
acuuacugcagccucaaccacc

SEQ ID NO: 32241 - RNA, 17 nt, Homo sapiens
gggagaggaggaggcga

SEQ ID NO: 32242 - RNA, 22 nt, Homo sapiens
gaaaagccagggucuguauaga

SEQ ID NO: 32243 - RNA, 22 nt, Homo sapiens
aggucucacuuuguugcccaga

SEQ ID NO: 32244 - RNA, 21 nt, Homo sapiens
ccugggcaacaaagugagauc

SEQ ID NO: 32245 - RNA, 20 nt, Homo sapiens
gaacgggagccggggcgcga

SEQ ID NO: 32246 - RNA, 25 nt, Homo sapiens
cagcgucugccggaacccguuccca

SEQ ID NO: 32247 - RNA, 21 nt, Homo sapiens
ucacccagaucugcggccuaa

SEQ ID NO: 32248 - RNA, 22 nt, Homo sapiens
uugcccagauccguggccuauu

SEQ ID NO: 32249 - RNA, 21 nt, Homo sapiens
auuaggccgcagaucugggug

SEQ ID NO: 32250 - RNA, 22 nt, Homo sapiens
ggagauggagccagggcccuaa

SEQ ID NO: 32251 - RNA, 22 nt, Homo sapiens
uacaucuggacagccgaaugaa

SEQ ID NO: 32252 - RNA, 24 nt, Homo sapiens
gaagucacucccaggcagcugcaa

SEQ ID NO: 32253 - RNA, 21 nt, Homo sapiens
uuuagcauaaguaugucccaa

SEQ ID NO: 32254 - RNA, 22 nt, Homo sapiens
gggguucgaggcuacagugaga

SEQ ID NO: 32255 - RNA, 22 nt, Homo sapiens
cacaucucacuguagccucaaa

SEQ ID NO: 32256 - RNA, 18 nt, Homo sapiens
aucacauucaccucccug

SEQ ID NO: 32257 - RNA, 19 nt, Homo sapiens
cagcaucagcagcaucauc

SEQ ID NO: 32258 - RNA, 24 nt, Homo sapiens
gaaagugcauagaauucugucugg

SEQ ID NO: 32259 - RNA, 22 nt, Homo sapiens
gcgagagugcgggccccaggag

SEQ ID NO: 32260 - RNA, 21 nt, Homo sapiens
cagcgaaacaggcaaacggag

SEQ ID NO: 32261 - RNA, 22 nt, Homo sapiens
ggagcccgcgccccgcgccgag

SEQ ID NO: 32262 - RNA, 21 nt, Homo sapiens
cggggugcacgggcggagggc

SEQ ID NO: 32263 - RNA, 22 nt, Homo sapiens
acaccuggcuccacacgcgggc

SEQ ID NO: 32264 - RNA, 22 nt, Homo sapiens
acaacuguaacuagacgguuuu

SEQ ID NO: 32265 - RNA, 18 nt, Homo sapiens
ggagaggagggcacugga

SEQ ID NO: 32266 - RNA, 18 nt, Homo sapiens
auucaaucuacugccuca

SEQ ID NO: 32267 - RNA, 22 nt, Homo sapiens
gaccagaggaaagccagccccu

SEQ ID NO: 32268 - RNA, 22 nt, Homo sapiens
ucaggaacugccuuucucucca

SEQ ID NO: 32269 - RNA, 22 nt, Homo sapiens
ccggcugcaacacaagacacga

SEQ ID NO: 32270 - RNA, 22 nt, Homo sapiens
gcccggguccuguguuguagcc

SEQ ID NO: 32271 - RNA, 21 nt, Homo sapiens
gaccaaucgccguccccgccg

SEQ ID NO: 32272 - RNA, 22 nt, Homo sapiens
cggugagcacccggccccugcg

SEQ ID NO: 32273 - RNA, 21 nt, Homo sapiens
cagggcaggcaccggcacuca

SEQ ID NO: 32274 - RNA, 22 nt, Homo sapiens
ggggacgaaauccaagcgcagc

SEQ ID NO: 32275 - RNA, 23 nt, Homo sapiens
cagcugcuuuugggauuccguug

SEQ ID NO: 32276 - RNA, 22 nt, Homo sapiens
ugagccacugugccuggccuga

SEQ ID NO: 32277 - RNA, 19 nt, Homo sapiens
uaugcuaccuuugcacggu

SEQ ID NO: 32278 - RNA, 20 nt, Homo sapiens
acagcaaggagggcaggagg

SEQ ID NO: 32279 - RNA, 20 nt, Homo sapiens
acauuacuguuaucaaaaca

SEQ ID NO: 32280 - RNA, 23 nt, Homo sapiens
guaaauagagguuuaauuaacac

SEQ ID NO: 32281 - RNA, 23 nt, Homo sapiens
aauaaauuaaauuuauauuacag

SEQ ID NO: 32282 - RNA, 22 nt, Homo sapiens
cacucagcggccguuuccccaa

SEQ ID NO: 32283 - RNA, 21 nt, Homo sapiens
gggaguucuuggcaugggagg

SEQ ID NO: 32284 - RNA, 21 nt, Homo sapiens
agaccuccuaugcuaagaacc

SEQ ID NO: 32285 - RNA, 21 nt, Homo sapiens
cuguccuuggcaaagagaaca

SEQ ID NO: 32286 - RNA, 22 nt, Homo sapiens
ucacauuugccugcagagauuu

SEQ ID NO: 32287 - RNA, 22 nt, Homo sapiens
cgcggugcuugacagaaccaug

SEQ ID NO: 32288 - RNA, 21 nt, Homo sapiens
acaugguuagaucaagcacaa

SEQ ID NO: 32289 - RNA, 22 nt, Homo sapiens
ccucgccucugacacuugcaga

SEQ ID NO: 32290 - RNA, 22 nt, Homo sapiens
ccaggcaacacacacugcucuc

SEQ ID NO: 32291 - RNA, 22 nt, Homo sapiens
ggguaaucacuggcaaugugau

SEQ ID NO: 32292 - RNA, 22 nt, Homo sapiens
ccugagccucucugccucugcu

SEQ ID NO: 32293 - RNA, 23 nt, Homo sapiens
gagccaaggcuaacagagccuca

SEQ ID NO: 32294 - RNA, 22 nt, Homo sapiens
gugcuuuaccaacuccaugaua

SEQ ID NO: 32295 - RNA, 22 nt, Homo sapiens
agucuccuggaggugguaaaac

SEQ ID NO: 32296 - RNA, 22 nt, Homo sapiens
ggaagacagcgcugaagaggcg

SEQ ID NO: 32297 - RNA, 23 nt, Homo sapiens
gacgucugaacagucacugccug

SEQ ID NO: 32298 - RNA, 23 nt, Homo sapiens
acugauuguccaaacgcaauucu

SEQ ID NO: 32299 - RNA, 22 nt, Homo sapiens
cgagaauuguggcuggacaucu

SEQ ID NO: 32300 - RNA, 24 nt, Homo sapiens
ugggagaaccucccugcuucugcu

SEQ ID NO: 32301 - RNA, 22 nt, Homo sapiens
aagcgguuuaccaucccacaua

SEQ ID NO: 32302 - RNA, 22 nt, Homo sapiens
auguaugugggacgguaaacca

SEQ ID NO: 32303 - RNA, 23 nt, Homo sapiens
gcuuugacaauaucauugcacug

SEQ ID NO: 32304 - RNA, 17 nt, Homo sapiens
aaacauggaagcaauua

SEQ ID NO: 32305 - RNA, 23 nt, Homo sapiens
uguaagguguugcaguguggcaa

SEQ ID NO: 32306 - RNA, 21 nt, Homo sapiens
uugcacaccacaacagccaga

SEQ ID NO: 32307 - RNA, 22 nt, Homo sapiens
cggugccuacugagcugauauc

SEQ ID NO: 32308 - RNA, 21 nt, Homo sapiens
cuggcucaguucagcaggaac

SEQ ID NO: 32309 - RNA, 20 nt, Homo sapiens
accaacuaguaaacccauau

SEQ ID NO: 32310 - RNA, 22 nt, Homo sapiens
auggcaauauguuggcauagca

SEQ ID NO: 32311 - RNA, 21 nt, Homo sapiens
agcuaugccagcaucuugccu

SEQ ID NO: 32312 - RNA, 18 nt, Homo sapiens
gaggccccugccgccccg

SEQ ID NO: 32313 - RNA, 19 nt, Homo sapiens
uccucucaacccagcuuuu

SEQ ID NO: 32314 - RNA, 22 nt, Homo sapiens
aagaggucgaccguguauuggg

SEQ ID NO: 32315 - RNA, 23 nt, Homo sapiens
ugcgaacucaccacggacaaccu

SEQ ID NO: 32316 - RNA, 23 nt, Homo sapiens
ucucugcaggccgugugcuuugc

SEQ ID NO: 32317 - RNA, 22 nt, Homo sapiens
gccuaagacacaggcccagaga

SEQ ID NO: 32318 - RNA, 21 nt, Homo sapiens
uucuaggauaggcccaggggc

SEQ ID NO: 32319 - RNA, 22 nt, Homo sapiens
gcuauaaaguaacugagacgga

SEQ ID NO: 32320 - RNA, 22 nt, Homo sapiens
ugaauccuugaauagguguguu

SEQ ID NO: 32321 - RNA, 24 nt, Homo sapiens
acucacaccuagguuccaaggauu

SEQ ID NO: 32322 - RNA, 22 nt, Homo sapiens
auaaggauuuuuaggggcauua

SEQ ID NO: 32323 - RNA, 23 nt, Homo sapiens
cacaucugcccccaaaagucccu

SEQ ID NO: 32324 - RNA, 22 nt, Homo sapiens
auaaggauuuuuaggggcauua

SEQ ID NO: 32325 - RNA, 22 nt, Homo sapiens
acagcugccccugaaagucccu

SEQ ID NO: 32326 - RNA, 24 nt, Homo sapiens
caucagucacuacucaucauuuuc

SEQ ID NO: 32327 - RNA, 23 nt, Homo sapiens
gcgcccggccuguguggugcuca

SEQ ID NO: 32328 - RNA, 21 nt, Homo sapiens
ccgagcaccacgcagaccagc

SEQ ID NO: 32329 - RNA, 22 nt, Homo sapiens
accagguuccaccccagcaggc

SEQ ID NO: 32330 - RNA, 23 nt, Homo sapiens
acaccccaaaaucgaagcacuuc

SEQ ID NO: 32331 - RNA, 22 nt, Homo sapiens
ggaaagcgcccccauuuugagu

SEQ ID NO: 32332 - RNA, 22 nt, Homo sapiens
aguuaguggaccauguuacaua

SEQ ID NO: 32333 - RNA, 21 nt, Homo sapiens
ccuacguuccauagucuacca

SEQ ID NO: 32334 - RNA, 22 nt, Homo sapiens
guggcuggugcucguaucuaca

SEQ ID NO: 32335 - RNA, 23 nt, Homo sapiens
cccccauugcuacagccgccugu

SEQ ID NO: 32336 - RNA, 22 nt, Homo sapiens
ccggguuaucuacaagggaauu

SEQ ID NO: 32337 - RNA, 22 nt, Homo sapiens
gacauccuguggucugcgcgua

SEQ ID NO: 32338 - RNA, 22 nt, Homo sapiens
uaugauccucaguuguguguaa

SEQ ID NO: 32339 - RNA, 23 nt, Homo sapiens
cgccaagugaagccugggggcua

SEQ ID NO: 32340 - RNA, 23 nt, Homo sapiens
auaucaacccucuccuaugcccu

SEQ ID NO: 32341 - RNA, 22 nt, Homo sapiens
agggguucaccgagcaacauuc

SEQ ID NO: 32342 - RNA, 23 nt, Homo sapiens
augcaaaguugcucggguaaccu

SEQ ID NO: 32343 - RNA, 22 nt, Homo sapiens
gguuaguggaccguguuacaua

SEQ ID NO: 32344 - RNA, 21 nt, Homo sapiens
cguacgcuauacggucuacua

SEQ ID NO: 32345 - RNA, 23 nt, Homo sapiens
acggcuaguggaccaggugaagu

SEQ ID NO: 32346 - RNA, 18 nt, Homo sapiens
cuguccaucagagaacac

SEQ ID NO: 32347 - RNA, 22 nt, Homo sapiens
agaagcccugcaagacgaccug

SEQ ID NO: 32348 - RNA, 21 nt, Homo sapiens
ugcaugacggccugcaagaca

SEQ ID NO: 32349 - RNA, 22 nt, Homo sapiens
acaccgaggagcccaucaugau

SEQ ID NO: 32350 - RNA, 23 nt, Homo sapiens
acagagaggagugcaacuagcaa

SEQ ID NO: 32351 - RNA, 25 nt, Homo sapiens
acagccgcuagcaauacacugccua

SEQ ID NO: 32352 - RNA, 22 nt, Homo sapiens
augaaugcaaaauguccccaau

SEQ ID NO: 32353 - RNA, 22 nt, Homo sapiens
auauuaggaacacaucgcaaaa

SEQ ID NO: 32354 - RNA, 22 nt, Homo sapiens
uauggaugcaaaaugaucccaa

SEQ ID NO: 32355 - RNA, 22 nt, Homo sapiens
uauucaggaacauauugcaaaa

SEQ ID NO: 32356 - RNA, 21 nt, Homo sapiens
guguauaugcccauggacugc

SEQ ID NO: 32357 - RNA, 22 nt, Homo sapiens
cgauguaguccaaaggcacaua

SEQ ID NO: 32358 - RNA, 23 nt, Homo sapiens
auguguguugcguguauguguau

SEQ ID NO: 32359 - RNA, 23 nt, Homo sapiens
gggaauuacaaucugacaugcaa

SEQ ID NO: 32360 - RNA, 21 nt, Homo sapiens
aagacgggaggagaggaguga

SEQ ID NO: 32361 - RNA, 22 nt, Homo sapiens
aucgggaggggacugagccuga

SEQ ID NO: 32362 - RNA, 22 nt, Homo sapiens
agagaggagagccguguaugac

SEQ ID NO: 32363 - RNA, 22 nt, Homo sapiens
gaauucaucacggccagccucu

SEQ ID NO: 32364 - RNA, 22 nt, Homo sapiens
aacuggaugucccuguaugauu

SEQ ID NO: 32365 - RNA, 22 nt, Homo sapiens
aaguggaugacccuguacgauu

SEQ ID NO: 32366 - RNA, 21 nt, Homo sapiens
gaccaagaaauagccuuucaa

SEQ ID NO: 32367 - RNA, 21 nt, Homo sapiens
uugagagugccauuaucuggg

SEQ ID NO: 32368 - RNA, 22 nt, Homo sapiens
cagcauggaguccuccagguug

SEQ ID NO: 32369 - RNA, 20 nt, Homo sapiens
acccaccuggagauccaugg

SEQ ID NO: 32370 - RNA, 22 nt, Homo sapiens
guagaagggaaucuugcauaag

SEQ ID NO: 32371 - RNA, 22 nt, Homo sapiens
ccucauggaaggguuccccacu

SEQ ID NO: 32372 - RNA, 23 nt, Homo sapiens
aagaaucuugucccgcagguccu

SEQ ID NO: 32373 - RNA, 22 nt, Homo sapiens
ucuaacaccacagugugguuug

SEQ ID NO: 32374 - RNA, 21 nt, Homo sapiens
acaaaccacagugugcugcug

SEQ ID NO: 32375 - RNA, 23 nt, Homo sapiens
gaaaaacgcccccuggcuugaaa

SEQ ID NO: 32376 - RNA, 20 nt, Homo sapiens
acuguauugucagguaguga

SEQ ID NO: 32377 - RNA, 21 nt, Homo sapiens
ucacuaccugacaauacagca

SEQ ID NO: 32378 - RNA, 22 nt, Homo sapiens
aaggaccuggacagaggcagaa

SEQ ID NO: 32379 - RNA, 24 nt, Homo sapiens
agcuccgccgcugaguccagcccu

SEQ ID NO: 32380 - RNA, 21 nt, Homo sapiens
aaguggucagugaggcaguca

SEQ ID NO: 32381 - RNA, 24 nt, Homo sapiens
acuaagugccucagaaaccaaauu

SEQ ID NO: 32382 - RNA, 21 nt, Homo sapiens
ccccaacaaccuagaaaagua

SEQ ID NO: 32383 - RNA, 23 nt, Homo sapiens
ucuacccugcaagguuguuguga

SEQ ID NO: 32384 - RNA, 22 nt, Homo sapiens
cugaggcccaggaaaauccaag

SEQ ID NO: 32385 - RNA, 22 nt, Homo sapiens
ucgugaauuugcccuguccuca

SEQ ID NO: 32386 - RNA, 22 nt, Homo sapiens
auuagaguuugguucauaugau

SEQ ID NO: 32387 - RNA, 22 nt, Homo sapiens
aaaccauaucagccagacucua

SEQ ID NO: 32388 - RNA, 21 nt, Homo sapiens
gcgaggcccugggagcacagg

SEQ ID NO: 32389 - RNA, 22 nt, Homo sapiens
ccacugugccccaagggccuca

SEQ ID NO: 32390 - RNA, 22 nt, Homo sapiens
uuuuggacuuucagauuuagga

SEQ ID NO: 32391 - RNA, 24 nt, Homo sapiens
auccccaaaucugaaaaaguccaa

SEQ ID NO: 32392 - RNA, 22 nt, Homo sapiens
cagaauccuugcccaggugcau

SEQ ID NO: 32393 - RNA, 23 nt, Homo sapiens
ucucacccagguagcaaggauua

SEQ ID NO: 32394 - RNA, 22 nt, Homo sapiens
cuggggaaugggagacacaaaa

SEQ ID NO: 32395 - RNA, 22 nt, Homo sapiens
aauuuugcucugccaucccccu

SEQ ID NO: 32396 - RNA, 22 nt, Homo sapiens
uguuauauauacagccaugcac

SEQ ID NO: 32397 - RNA, 21 nt, Homo sapiens
gagugcauggcuguauauaua

SEQ ID NO: 32398 - RNA, 22 nt, Homo sapiens
agaauccuugcccgggugcauu

SEQ ID NO: 32399 - RNA, 22 nt, Homo sapiens
ucucacccagggacaaaggauu

SEQ ID NO: 32400 - RNA, 22 nt, Homo sapiens
ugaauccuugcccaggugcauu

SEQ ID NO: 32401 - RNA, 21 nt, Homo sapiens
uagcacccagauagcaaggau

SEQ ID NO: 32402 - RNA, 22 nt, Homo sapiens
gauagagugcagaccagggucu

SEQ ID NO: 32403 - RNA, 21 nt, Homo sapiens
accuuacaaccgcagcugcaa

SEQ ID NO: 32404 - RNA, 22 nt, Homo sapiens
aggaaaccagcaaguguugacg

SEQ ID NO: 32405 - RNA, 22 nt, Homo sapiens
acaucaauacuuccuggcuccc

SEQ ID NO: 32406 - RNA, 21 nt, Homo sapiens
ucuacucagaagggugccuua

SEQ ID NO: 32407 - RNA, 22 nt, Homo sapiens
uuaaguaacaccuuccugaaua

SEQ ID NO: 32408 - RNA, 21 nt, Homo sapiens
uucacuccaaaaggugcaaaa

SEQ ID NO: 32409 - RNA, 23 nt, Homo sapiens
ucuacuccaaaaggcuacaauca

SEQ ID NO: 32410 - RNA, 23 nt, Homo sapiens
caugccagcaaagcuacaaaccc

SEQ ID NO: 32411 - RNA, 23 nt, Homo sapiens
cuccauccaaucccugagcccug

SEQ ID NO: 32412 - RNA, 23 nt, Homo sapiens
ucagugggauuuccgaguagcau

SEQ ID NO: 32413 - RNA, 21 nt, Homo sapiens
gaugcuacucagaaaucccac

SEQ ID NO: 32414 - RNA, 23 nt, Homo sapiens
cacccuacaccaaucugccccgg

SEQ ID NO: 32415 - RNA, 23 nt, Homo sapiens
cagcacagucuugucgucuccgu

SEQ ID NO: 32416 - RNA, 22 nt, Homo sapiens
gaugccaagcucagcguggauu

SEQ ID NO: 32417 - RNA, 23 nt, Homo sapiens
gcuccuagccagccucauuuccu

SEQ ID NO: 32418 - RNA, 22 nt, Homo sapiens
cuacccacagacguaccaauca

SEQ ID NO: 32419 - RNA, 22 nt, Homo sapiens
agguucaaggcauucacugauu

SEQ ID NO: 32420 - RNA, 21 nt, Homo sapiens
cgcggugguucacgccuguaa

SEQ ID NO: 32421 - RNA, 21 nt, Homo sapiens
ugauugccacugucugcagua

SEQ ID NO: 32422 - RNA, 21 nt, Homo sapiens
gccugaccaacauggugaaac

SEQ ID NO: 32423 - RNA, 23 nt, Homo sapiens
ccuucucagaaaggugaaauuua

SEQ ID NO: 32424 - RNA, 22 nt, Homo sapiens
auaaaugacaccuccuugugaa

SEQ ID NO: 32425 - RNA, 23 nt, Homo sapiens
ucuucucagaaaggugaaauuua

SEQ ID NO: 32426 - RNA, 22 nt, Homo sapiens
auaaacgacaccuccuugagaa

SEQ ID NO: 32427 - RNA, 21 nt, Homo sapiens
ucuacucacagaagugucaau

SEQ ID NO: 32428 - RNA, 23 nt, Homo sapiens
caugauugucacucuccagagua

SEQ ID NO: 32429 - RNA, 21 nt, Homo sapiens
uccacucacagaggugucaau

SEQ ID NO: 32430 - RNA, 22 nt, Homo sapiens
augauugccucccucuugagaa

SEQ ID NO: 32431 - RNA, 22 nt, Homo sapiens
aacgcuccaaaagaaggcacuc

SEQ ID NO: 32432 - RNA, 18 nt, Homo sapiens
acccucugaaaggaagca

SEQ ID NO: 32433 - RNA, 22 nt, Homo sapiens
aaagugcuucuuaccuccagau

SEQ ID NO: 32434 - RNA, 22 nt, Homo sapiens
uccagcaaagggaagcgcuuuc

SEQ ID NO: 32435 - RNA, 20 nt, Homo sapiens
gaaagggcuucccuuugcag

SEQ ID NO: 32436 - RNA, 21 nt, Homo sapiens
gcuccaaagggaagcgcuuug

SEQ ID NO: 32437 - RNA, 22 nt, Homo sapiens
cagaaagugcuucccucuagag

SEQ ID NO: 32438 - RNA, 21 nt, Homo sapiens
cacucugaagggaagcgcuuu

SEQ ID NO: 32439 - RNA, 22 nt, Homo sapiens
cagaaagcgcuucccucuagag

SEQ ID NO: 32440 - RNA, 22 nt, Homo sapiens
aaccucuaaaaggaugcacuuu

SEQ ID NO: 32441 - RNA, 22 nt, Homo sapiens
cagaaagcgcuucccucuagag

SEQ ID NO: 32442 - RNA, 22 nt, Homo sapiens
auccucuaaaaagaugcacuuu

SEQ ID NO: 32443 - RNA, 22 nt, Homo sapiens
cagaaagcgcuucccucuagag

SEQ ID NO: 32444 - RNA, 21 nt, Homo sapiens
cccucuaaaaggaagcacuuu

SEQ ID NO: 32445 - RNA, 22 nt, Homo sapiens
acccucuaaaaggaagcacuuu

SEQ ID NO: 32446 - RNA, 22 nt, Homo sapiens
cagaaagugcuucccucuagag

SEQ ID NO: 32447 - RNA, 22 nt, Homo sapiens
acccaccaaagagaagcacuuu

SEQ ID NO: 32448 - RNA, 20 nt, Homo sapiens
gaaagggcuucccuuuguag

SEQ ID NO: 32449 - RNA, 21 nt, Homo sapiens
cccucaaaaaggaagcacuuu

SEQ ID NO: 32450 - RNA, 22 nt, Homo sapiens
aacccucuaaaaggaagcacuu

SEQ ID NO: 32451 - RNA, 24 nt, Homo sapiens
acacucuaaagggaagcacuuugu

SEQ ID NO: 32452 - RNA, 22 nt, Homo sapiens
acacucuaaagggaagugcguu

SEQ ID NO: 32453 - RNA, 22 nt, Homo sapiens
acacucuaaagggaaccauuuu

SEQ ID NO: 32454 - RNA, 22 nt, Homo sapiens
cagaaagcgcuucccucuagag

SEQ ID NO: 32455 - RNA, 23 nt, Homo sapiens
acccucuauagggaagcgcguuc

SEQ ID NO: 32456 - RNA, 22 nt, Homo sapiens
cagaaagcgcuucccucuagag

SEQ ID NO: 32457 - RNA, 21 nt, Homo sapiens
acuccaaagggaagcgccuuc

SEQ ID NO: 32458 - RNA, 20 nt, Homo sapiens
gaaagggcuucccuuugcag

SEQ ID NO: 32459 - RNA, 22 nt, Homo sapiens
ugcaagccuugggugugggagg

SEQ ID NO: 32460 - RNA, 22 nt, Homo sapiens
acgguccuacacucaaggcaug

SEQ ID NO: 32461 - RNA, 22 nt, Homo sapiens
aaagaaauuguccuuguaugau

SEQ ID NO: 32462 - RNA, 22 nt, Homo sapiens
acacaccaaggauaauuucucc

SEQ ID NO: 32463 - RNA, 22 nt, Homo sapiens
aguccagauucugugcccacca

SEQ ID NO: 32464 - RNA, 25 nt, Homo sapiens
agugggaccgacagcagaauccuuu

SEQ ID NO: 32465 - RNA, 23 nt, Homo sapiens
ucucgugacaugaugauccccga

SEQ ID NO: 32466 - RNA, 22 nt, Homo sapiens
aagaagugcaccgcgaauguuu

SEQ ID NO: 32467 - RNA, 22 nt, Homo sapiens
gaacuugcuaaaaaugcagaau

SEQ ID NO: 32468 - RNA, 22 nt, Homo sapiens
uuagaaaugcacaaccucaggu

SEQ ID NO: 32469 - RNA, 22 nt, Homo sapiens
gcacacaauaaauguuugcuga

SEQ ID NO: 32470 - RNA, 22 nt, Homo sapiens
ucaucuaauaaacauuuacuga

SEQ ID NO: 32471 - RNA, 22 nt, Homo sapiens
uggugcaaaaguaacuguagcu

SEQ ID NO: 32472 - RNA, 20 nt, Homo sapiens
gaaaguaauugcaguuuuua

SEQ ID NO: 32473 - RNA, 23 nt, Homo sapiens
caaaaacugcaauuacuuuugca

SEQ ID NO: 32474 - RNA, 22 nt, Homo sapiens
ugcaaaaguagucacggucuuu

SEQ ID NO: 32475 - RNA, 22 nt, Homo sapiens
ugcaaaaaccguaguuacuucu

SEQ ID NO: 32476 - RNA, 19 nt, Homo sapiens
aaaaguaauugugguuuuu

SEQ ID NO: 32477 - RNA, 19 nt, Homo sapiens
aaagaccgcaauuacuuuu

SEQ ID NO: 32478 - RNA, 22 nt, Homo sapiens
gcaaaaguaauugcaguuuuug

SEQ ID NO: 32479 - RNA, 22 nt, Homo sapiens
ggcaaaaacagcaauuacuuuc

SEQ ID NO: 32480 - RNA, 21 nt, Homo sapiens
gcaaaaauaacugcaguuuua

SEQ ID NO: 32481 - RNA, 21 nt, Homo sapiens
gcaaaaacugcaauuacuuuu

SEQ ID NO: 32482 - RNA, 22 nt, Homo sapiens
acaaacauaauuguggguuuua

SEQ ID NO: 32483 - RNA, 22 nt, Homo sapiens
ggcaaaacccgcaauuacuuuu

SEQ ID NO: 32484 - RNA, 21 nt, Homo sapiens
acaaaaguuacugcgguuuug

SEQ ID NO: 32485 - RNA, 22 nt, Homo sapiens
agccaaaaccgcaauaacuuuu

SEQ ID NO: 32486 - RNA, 21 nt, Homo sapiens
cuggugcaaaaguaacugcca

SEQ ID NO: 32487 - RNA, 21 nt, Homo sapiens
gcaaaaaccgcaauuacuuuu

SEQ ID NO: 32488 - RNA, 20 nt, Homo sapiens
gcaaaaguaacugcaguuuu

SEQ ID NO: 32489 - RNA, 18 nt, Homo sapiens
aaauccgcaaguacuuuu

SEQ ID NO: 32490 - RNA, 20 nt, Homo sapiens
aaccgugaugacuuuugcac

SEQ ID NO: 32491 - RNA, 22 nt, Homo sapiens
ccgccauuacuuuugcaccagc

SEQ ID NO: 32492 - RNA, 22 nt, Homo sapiens
ggcaaaaacagugauuacuuuu

SEQ ID NO: 32493 - RNA, 20 nt, Homo sapiens
cucuuacucccucaggcacu

SEQ ID NO: 32494 - RNA, 22 nt, Homo sapiens
augugccugagggaguaagaca

SEQ ID NO: 32495 - RNA, 23 nt, Homo sapiens
gggcucuuacucccucaggcacu

SEQ ID NO: 32496 - RNA, 21 nt, Homo sapiens
uggaaaccaagagugggucgc

SEQ ID NO: 32497 - RNA, 22 nt, Homo sapiens
gaucugguacuccuuaagcuaa

SEQ ID NO: 32498 - RNA, 21 nt, Homo sapiens
guuagcuuaaggaguaccaua

SEQ ID NO: 32499 - RNA, 19 nt, Homo sapiens
auuuugguacagcagcuca

SEQ ID NO: 32500 - RNA, 22 nt, Homo sapiens
gugcuggcucacuucauaugug

SEQ ID NO: 32501 - RNA, 22 nt, Homo sapiens
acacauaugaaaugagccagca

SEQ ID NO: 32502 - RNA, 22 nt, Homo sapiens
ggaacuucuaggaggcauggaa

SEQ ID NO: 32503 - RNA, 22 nt, Homo sapiens
ucuccauuucuccuggaaggcu

SEQ ID NO: 32504 - RNA, 22 nt, Homo sapiens
ccuaggcacacuuaaaguuuua

SEQ ID NO: 32505 - RNA, 22 nt, Homo sapiens
gcuauaacuuuaagugugccua

SEQ ID NO: 32506 - RNA, 22 nt, Homo sapiens
ccaaacuaauauacccauauuc

SEQ ID NO: 32507 - RNA, 22 nt, Homo sapiens
cagaauauggguauauuaguuu

SEQ ID NO: 32508 - RNA, 22 nt, Homo sapiens
aauugggcaaagggaagaacua

SEQ ID NO: 32509 - RNA, 22 nt, Homo sapiens
ucuaguucuucccauuucccug

SEQ ID NO: 32510 - RNA, 22 nt, Homo sapiens
accuguagucccagcuauucag

SEQ ID NO: 32511 - RNA, 22 nt, Homo sapiens
cucucgaguagcugguacuuca

SEQ ID NO: 32512 - RNA, 22 nt, Homo sapiens
cuuuaaccagcuugucacucug

SEQ ID NO: 32513 - RNA, 22 nt, Homo sapiens
gcauauaguaacaagcuggaua

SEQ ID NO: 32514 - RNA, 21 nt, Homo sapiens
gaugaucacacugcccggggc

SEQ ID NO: 32515 - RNA, 18 nt, Homo sapiens
agucccggaggugaccau

SEQ ID NO: 32516 - RNA, 19 nt, Homo sapiens
gcuggcauuagugggacuu

SEQ ID NO: 32517 - RNA, 21 nt, Homo sapiens
aaaagucccacuaaugccagu

SEQ ID NO: 32518 - RNA, 23 nt, Homo sapiens
ugggagcuagguugccaugugca

SEQ ID NO: 32519 - RNA, 21 nt, Homo sapiens
acugcacaagagcacccagcc

SEQ ID NO: 32520 - RNA, 21 nt, Homo sapiens
uuuuggugcauauuuacuuua

SEQ ID NO: 32521 - RNA, 21 nt, Homo sapiens
uugccauacaugaacuuuauu

SEQ ID NO: 32522 - RNA, 21 nt, Homo sapiens
aauaaagucuauguauggcaa

SEQ ID NO: 32523 - RNA, 21 nt, Homo sapiens
ugggagcuaagcuauggguau

SEQ ID NO: 32524 - RNA, 21 nt, Homo sapiens
auacccauagcuuagcuccca

SEQ ID NO: 32525 - RNA, 22 nt, Homo sapiens
acuucaaggaucuuaaacuuug

SEQ ID NO: 32526 - RNA, 22 nt, Homo sapiens
ggcaaaguuuaagauccuugau

SEQ ID NO: 32527 - RNA, 20 nt, Homo sapiens
gcaaaugguacagcuacuuu

SEQ ID NO: 32528 - RNA, 19 nt, Homo sapiens
gccugcugacaccgugccu

SEQ ID NO: 32529 - RNA, 19 nt, Homo sapiens
guugggaucacaggcgccc

SEQ ID NO: 32530 - RNA, 23 nt, Homo sapiens
guucuguccuggaagaacauacu

SEQ ID NO: 32531 - RNA, 22 nt, Homo sapiens
gcagauuaguccagcauuucuc

SEQ ID NO: 32532 - RNA, 22 nt, Homo sapiens
aagagguauugccacccuuucu

SEQ ID NO: 32533 - RNA, 22 nt, Homo sapiens
acuagaaaggguggcaauaccu

SEQ ID NO: 32534 - RNA, 22 nt, Homo sapiens
accuuauccugcaaggugcuac

SEQ ID NO: 32535 - RNA, 24 nt, Homo sapiens
gaagucagagaaucugcaucugua

SEQ ID NO: 32536 - RNA, 20 nt, Homo sapiens
cuguugcucaggcuagaguu

SEQ ID NO: 32537 - RNA, 22 nt, Homo sapiens
cccgugauaacugcugggcugu

SEQ ID NO: 32538 - RNA, 21 nt, Homo sapiens
acaauacaauacgauacgaua

SEQ ID NO: 32539 - RNA, 22 nt, Homo sapiens
auuugacccuaaaacguucuaa

SEQ ID NO: 32540 - RNA, 22 nt, Homo sapiens
gcuguuuuacagguguuuguua

SEQ ID NO: 32541 - RNA, 22 nt, Homo sapiens
ucuaggacuacagguguaugcu

SEQ ID NO: 32542 - RNA, 21 nt, Homo sapiens
acuuuccaggauucauuaacu

SEQ ID NO: 32543 - RNA, 21 nt, Homo sapiens
ccuaauagagguaguagcuga

SEQ ID NO: 32544 - RNA, 22 nt, Homo sapiens
gcuuucucggagcucagagcaa

SEQ ID NO: 32545 - RNA, 22 nt, Homo sapiens
acacccacugugguauuauuug

SEQ ID NO: 32546 - RNA, 20 nt, Homo sapiens
acaccuacugugauauuauu

SEQ ID NO: 32547 - RNA, 22 nt, Homo sapiens
guacaccuacugugauauuauu

SEQ ID NO: 32548 - RNA, 22 nt, Homo sapiens
gaguucauuucagagccacugc

SEQ ID NO: 32549 - RNA, 21 nt, Homo sapiens
cugagacagucccaugaucug

SEQ ID NO: 32550 - RNA, 22 nt, Homo sapiens
cugucuagauucuucuuggagu

SEQ ID NO: 32551 - RNA, 22 nt, Homo sapiens
ggcaucagacuacuuaaaugag

SEQ ID NO: 32552 - RNA, 22 nt, Homo sapiens
ccuuuaucaugaaacuacuuga

SEQ ID NO: 32553 - RNA, 22 nt, Homo sapiens
ccacaaucacugcacuccccca

SEQ ID NO: 32554 - RNA, 22 nt, Homo sapiens
gcuccaacaaggaaagacagga

SEQ ID NO: 32555 - RNA, 22 nt, Homo sapiens
ccuucaauaauuuaaugcauua

SEQ ID NO: 32556 - RNA, 19 nt, Homo sapiens
aaucagaacgugacaauaa

SEQ ID NO: 32557 - RNA, 22 nt, Homo sapiens
caugggauauguugcugacuca

SEQ ID NO: 32558 - RNA, 18 nt, Homo sapiens
accuucccgacuucuccu

SEQ ID NO: 32559 - RNA, 22 nt, Homo sapiens
gcaaagguaauugcuguuuucg

SEQ ID NO: 32560 - RNA, 22 nt, Homo sapiens
gcauaaugggaugauggccuaa

SEQ ID NO: 32561 - RNA, 23 nt, Homo sapiens
cacaggccaugagccccgaaaca

SEQ ID NO: 32562 - RNA, 22 nt, Homo sapiens
gggaaaaacugcaauuaccuuu

SEQ ID NO: 32563 - RNA, 22 nt, Homo sapiens
agcuucagcauguuauccagaa

SEQ ID NO: 32564 - RNA, 22 nt, Homo sapiens
gccuuguacagcauucaaacgu

SEQ ID NO: 32565 - RNA, 20 nt, Homo sapiens
ggucaggcacagucgcucau

SEQ ID NO: 32566 - RNA, 19 nt, Homo sapiens
gcuccuguccaacuggcuc

SEQ ID NO: 32567 - RNA, 23 nt, Homo sapiens
aaucgcgguuuauaccaaaugaa

SEQ ID NO: 32568 - RNA, 22 nt, Homo sapiens
ccuaaugauucaucauucucaa

SEQ ID NO: 32569 - RNA, 23 nt, Homo sapiens
aguaacugguugaacaacuguaa

SEQ ID NO: 32570 - RNA, 21 nt, Homo sapiens
guaaugggaccuuccucuuug

SEQ ID NO: 32571 - RNA, 22 nt, Homo sapiens
agccugguuggccuggaacuga

SEQ ID NO: 32572 - RNA, 22 nt, Homo sapiens
cucagucccaggcaaaccauaa

SEQ ID NO: 32573 - RNA, 19 nt, Homo sapiens
uagcauacagauacgccca

SEQ ID NO: 32574 - RNA, 20 nt, Homo sapiens
acaaugagaacccauggucu

SEQ ID NO: 32575 - RNA, 22 nt, Homo sapiens
acaucaucgcauauugacacaa

SEQ ID NO: 32576 - RNA, 19 nt, Homo sapiens
agaaaccccagcagagaca

SEQ ID NO: 32577 - RNA, 25 nt, Homo sapiens
gcugagcaaugccuggcuggugccu

SEQ ID NO: 32578 - RNA, 21 nt, Homo sapiens
agacacaccacggcacacuuc

SEQ ID NO: 32579 - RNA, 21 nt, Homo sapiens
cccgaggagccgggcaggcuu

SEQ ID NO: 32580 - RNA, 20 nt, Homo sapiens
guuugauaaacugacacaac

SEQ ID NO: 32581 - RNA, 22 nt, Homo sapiens
cuccuccaacaauccuagacca

SEQ ID NO: 32582 - RNA, 22 nt, Homo sapiens
gcaaaaguaauugcagugugug

SEQ ID NO: 32583 - RNA, 25 nt, Homo sapiens
acggagcugucccaacaccaccccu

SEQ ID NO: 32584 - RNA, 21 nt, Homo sapiens
ucccagcacacauuuagcuca

SEQ ID NO: 32585 - RNA, 23 nt, Homo sapiens
gucagaccccgagggguccucgc

SEQ ID NO: 32586 - RNA, 25 nt, Homo sapiens
aaggagcucagaagcccugcccagc

SEQ ID NO: 32587 - RNA, 20 nt, Homo sapiens
uccucccccuuccuuuuccc

SEQ ID NO: 32588 - RNA, 20 nt, Homo sapiens
uccgccgcuccgccuuccgc

SEQ ID NO: 32589 - RNA, 18 nt, Homo sapiens
ucuccgccgggccuucac

SEQ ID NO: 32590 - RNA, 19 nt, Homo sapiens
ccucccacccacucccuca

SEQ ID NO: 32591 - RNA, 19 nt, Homo sapiens
uuuugacuccaauuccagu

SEQ ID NO: 32592 - RNA, 19 nt, Homo sapiens
uauacacccaacucccuca

SEQ ID NO: 32593 - RNA, 19 nt, Homo sapiens
cauacaauccacucccuca

SEQ ID NO: 32594 - RNA, 19 nt, Homo sapiens
cacucccaucugaccagcc

SEQ ID NO: 32595 - RNA, 19 nt, Homo sapiens
ugcaauccccagcccugcu

SEQ ID NO: 32596 - RNA, 19 nt, Homo sapiens
uacccaaccuccucccuca

SEQ ID NO: 32597 - RNA, 19 nt, Homo sapiens
ucuacauccuaccaccuca

SEQ ID NO: 32598 - RNA, 22 nt, Homo sapiens
aagagggagacccaggcucgga

SEQ ID NO: 32599 - RNA, 22 nt, Homo sapiens
gauccgagcaccggggaccccc

SEQ ID NO: 32600 - RNA, 22 nt, Homo sapiens
cugcucaaacccuccaaugacu

SEQ ID NO: 32601 - RNA, 19 nt, Homo sapiens
cuccccucaccuccugcug

SEQ ID NO: 32602 - RNA, 22 nt, Homo sapiens
aagucacugaaggguuuugagu

SEQ ID NO: 32603 - RNA, 22 nt, Homo sapiens
gccaccuucaaaugggaagucu

SEQ ID NO: 32604 - RNA, 23 nt, Homo sapiens
acucagaaggacaaguagaguuu

SEQ ID NO: 32605 - RNA, 21 nt, Homo sapiens
agguaagcgcuguugcuagcc

SEQ ID NO: 32606 - RNA, 21 nt, Homo sapiens
gcuccaaccucagcagacugu

SEQ ID NO: 32607 - RNA, 23 nt, Homo sapiens
acccaacagccccugcaagggau

SEQ ID NO: 32608 - RNA, 22 nt, Homo sapiens
uccucuuuucuuagagacucac

SEQ ID NO: 32609 - RNA, 21 nt, Homo sapiens
ucgacugccacucuuacuaga

SEQ ID NO: 32610 - RNA, 22 nt, Homo sapiens
ccucuaguaaauaugucagcau

SEQ ID NO: 32611 - RNA, 22 nt, Homo sapiens
gcugggcuuacguugggagaac

SEQ ID NO: 32612 - RNA, 21 nt, Homo sapiens
aguucucccaacguaaaccca

SEQ ID NO: 32613 - RNA, 19 nt, Homo sapiens
ucccacaggaagcagacac

SEQ ID NO: 32614 - RNA, 23 nt, Homo sapiens
uuuauugugguagauacuauuag

SEQ ID NO: 32615 - RNA, 23 nt, Homo sapiens
ugcgggcgggacgagcaagcaca

SEQ ID NO: 32616 - RNA, 25 nt, Homo sapiens
aggccgccacccgcccgcgaucccu

SEQ ID NO: 32617 - RNA, 21 nt, Homo sapiens
agaggcagguuccuggaucau

SEQ ID NO: 32618 - RNA, 19 nt, Homo sapiens
gcucuaagaaagccacacu

SEQ ID NO: 32619 - RNA, 19 nt, Homo sapiens
ucagcaguaccagccuaga

SEQ ID NO: 32620 - RNA, 19 nt, Homo sapiens
gccucagaggcagcugcuu

SEQ ID NO: 32621 - RNA, 21 nt, Homo sapiens
gaaggaagugagugcagccac

SEQ ID NO: 32622 - RNA, 21 nt, Homo sapiens
guccugagagcgcugccuccu

SEQ ID NO: 32623 - RNA, 21 nt, Homo sapiens
cacaacccuaguggcgccauu

SEQ ID NO: 32624 - RNA, 25 nt, Homo sapiens
ugaauggcacccucuccuaggguug

SEQ ID NO: 32625 - RNA, 22 nt, Homo sapiens
aaagagguuaaccauguauuau

SEQ ID NO: 32626 - RNA, 21 nt, Homo sapiens
agagguugacuguauaauauu

SEQ ID NO: 32627 - RNA, 25 nt, Homo sapiens
accaacggaccuacuucccuccgcc

SEQ ID NO: 32628 - RNA, 24 nt, Homo sapiens
acgcgcaggccagagacccaggca

SEQ ID NO: 32629 - RNA, 22 nt, Homo sapiens
gcggucccgcggcgccccgccu

SEQ ID NO: 32630 - RNA, 22 nt, Homo sapiens
ccucaggcacggccgggccacc

SEQ ID NO: 32631 - RNA, 20 nt, Homo sapiens
aggggccucagccuccuggu

SEQ ID NO: 32632 - RNA, 20 nt, Homo sapiens
caccacauacacucagggac

SEQ ID NO: 32633 - RNA, 21 nt, Homo sapiens
gguggagcccugagaaccgga

SEQ ID NO: 32634 - RNA, 23 nt, Homo sapiens
cuccagccccuccagggcuuccu

SEQ ID NO: 32635 - RNA, 20 nt, Homo sapiens
ugagcggugagggcauacag

SEQ ID NO: 32636 - RNA, 23 nt, Homo sapiens
cacugugggcccucuccgcacca

SEQ ID NO: 32637 - RNA, 22 nt, Homo sapiens
cuagaagcucacagucuaguug

SEQ ID NO: 32638 - RNA, 23 nt, Homo sapiens
cccagcuagauuguaagcuccuu

SEQ ID NO: 32639 - RNA, 22 nt, Homo sapiens
cuuacgucucucccuggguccc

SEQ ID NO: 32640 - RNA, 22 nt, Homo sapiens
gucaaaauuguuugcacucugc

SEQ ID NO: 32641 - RNA, 20 nt, Homo sapiens
uccccacagacccagagccg

SEQ ID NO: 32642 - RNA, 22 nt, Homo sapiens
ugugucaguuucacccugcugc

SEQ ID NO: 32643 - RNA, 21 nt, Homo sapiens
caucaccuuccuucuccucca

SEQ ID NO: 32644 - RNA, 23 nt, Homo sapiens
agaaaccaugggguaugagcaga

SEQ ID NO: 32645 - RNA, 23 nt, Homo sapiens
caugcucagacaaccauggugca

SEQ ID NO: 32646 - RNA, 23 nt, Homo sapiens
aaccaagaccccggagaucccag

SEQ ID NO: 32647 - RNA, 22 nt, Homo sapiens
agcucagaacccagaggucuca

SEQ ID NO: 32648 - RNA, 23 nt, Homo sapiens
uggcccugacacgugguacugga

SEQ ID NO: 32649 - RNA, 22 nt, Homo sapiens
ucccgggaacucaucagucucc

SEQ ID NO: 32650 - RNA, 21 nt, Homo sapiens
aggagacucacaaguuccugc

SEQ ID NO: 32651 - RNA, 22 nt, Homo sapiens
ucggucccucgggccagggcag

SEQ ID NO: 32652 - RNA, 21 nt, Homo sapiens
cacaaccucaguguuuccagg

SEQ ID NO: 32653 - RNA, 22 nt, Homo sapiens
caccugauaaaacugagguaua

SEQ ID NO: 32654 - RNA, 22 nt, Homo sapiens
ugaauuacuuuguaaaccacca

SEQ ID NO: 32655 - RNA, 22 nt, Homo sapiens
uggugauucacaaagaaaucca

SEQ ID NO: 32656 - RNA, 21 nt, Homo sapiens
cugggaggagggagaagagga

SEQ ID NO: 32657 - RNA, 20 nt, Homo sapiens
cccugcgccaucuccucuac

SEQ ID NO: 32658 - RNA, 22 nt, Homo sapiens
ccucgggauggcgcccguucac

SEQ ID NO: 32659 - RNA, 22 nt, Homo sapiens
uucacccaaagaggugucaguc

SEQ ID NO: 32660 - RNA, 21 nt, Homo sapiens
ugacugacagcuuuuugagua

SEQ ID NO: 32661 - RNA, 21 nt, Homo sapiens
acaaugguuguccgauauuaa

SEQ ID NO: 32662 - RNA, 22 nt, Homo sapiens
ggcagagagucagagcgcggau

SEQ ID NO: 32663 - RNA, 20 nt, Homo sapiens
ccagccccacccugacucac

SEQ ID NO: 32664 - RNA, 22 nt, Homo sapiens
acuggguucaccuuuaagggca

SEQ ID NO: 32665 - RNA, 22 nt, Homo sapiens
cacauggccaaaacagagaaga

SEQ ID NO: 32666 - RNA, 22 nt, Homo sapiens
cucauccgauguacaauaauuu

SEQ ID NO: 32667 - RNA, 22 nt, Homo sapiens
ugcucaauaaauacccguugaa

SEQ ID NO: 32668 - RNA, 22 nt, Homo sapiens
gggaaaguaguaaguuguauag

SEQ ID NO: 32669 - RNA, 22 nt, Homo sapiens
aacaauacaacuuacuaccuca

SEQ ID NO: 32670 - DNA, 1946 bp, Homo sapiens
gcttctgagcggaaactgaaagtgaaatagggagctggctaccagcgttgagtcccctgtaaagccaaaccccctaaaggtctccacactgctgtttaacggcacacttgacaatggcttcagcagcacgcttgacaatgatgtgggaggaggtcacatgccctatctgcctggaccccttcgtggagcctgtgagcatcgagtgtggccacagcttctgccaggaatgcatctctcaggttgggaaaggtgggggcagcgtctgtcctgtgtgccggcagcgctttctgctcaagaatctccggcccaatcgacagctagccaacatggtgaacaaccttaaagaaatcagccaggaggccagagagggcacacagggggaacggtgtgcagtgcatggagagagacttcacctgttctgtgagaaagatgggaaggccctttgctgggtatgtgcccagtctcggaaacaccgtgaccacgccatggtccctcttgaggaggctgcacaggagtaccaggagaagctccaggtggcattaggggaactgagaagaaagcaggagttggctgagaagttggaagtggaaattgcaataaagagagcagactggaagaaaacagtggaaacacagaaatctaggattcacgcagagtttgtgcagcaaaaaaacttcctggttgaagaagaacagaggcagctgcaggagctggagaaggatgagagggagcagctgagaatcctgggggagaaagaggccaagctggcccagcagagccaggccctacaggagctcatctcagagctagatcgaaggtgccacagctcagcactggaactgctgcaggaggtgataattgtcctggaaaggagtgagtcctggaacctgaaggacctggatattacctctccagaactcaggagtgtgtgccatgtgccagggctgaagaagatgctgaggacatgtgcagtccacatcactctggatccagacacagccaatccgtggctgatactttcagaagatcggagacaagtgaggcttggagacacccagcagagcatacctggaaatgaagagagatttgatagttatcctatggtcctgggtgcccagcactttcactctggaaaacattactgggaggtagatgtgacaggaaaggaggcctgggacctgggtgtctgcagagactctgtgcgcaggaaggggcactttttgcttagttccaagagtggcttctggacaatttggttgtggaacaaacaaaaatatgaggctggcacctacccccagactcccctccaccttcaggtgcctccatgccaagttgggattttcctggactatgaggctggcatggtctccttctacaacatcactgaccatggctccctcatctactccttctctgaatgtgcctttacaggacctctgcggcccttcttcagtcctggtttcaatgatggaggaaaaaacacagcccctctaaccctctgtccactgaatattggatcacaaggatccactgactattgatggctttctctggacactgccactctccccattggcaccgcttctcagccacaaaccctgcctcttttccccatgaactctgaaccacctttgtctctgcagaggcatccggatcccagcaagcgagctttagcagggaagtcacttcaccatcaacattcctgccccagatggctttgtgattccctccagtgaagcagcctccttatatttggcccaaactcatcttgatcaaccaaaaacatgtttctgccttctttatgggacttaagttttttttttctcctctccatctctaggatgtcgtctttggtgagatctctattatatcttgtatggtttgcaaaagggcttcctaaaaataaaaaataaaatttaaaaaactgtgaaaaaaaaaaaaaaaaa

SEQ ID NO: 32671 - protein, 475 aa, Homo sapiens [sequence omitted]

SEQ ID NO: 32672 - DNA, 3590 bp, Artificial Sequence
  source: /note="Description of Artificial Sequence: Synthetic polynucleotide"
cctgcaggcagctgcgcgctcgctcgctcactgaggccgcccgggcaaagcccgggcgtcgggcgacctttggtcgcccggcctcagtgagcgagcgagcgcgcagagagggagtggccaactccatcactaggggttccttgtagttaatgattaacccgccatgctacttatctacgtagccatgcgtcgacataacgcgtcgacattgattattgactagttattaatagtaatcaattacggggtcattagttcatagcccatatatggagttccgcgttacataacttacggtaaatggcccgcctggctgaccgcccaacgacccccgcccattgacgtcaataatgacgtatgttcccatagtaacgccaatagggactttccattgacgtcaatgggtggagtatttacggtaaactgcccacttggcagtacatcaagtgtatcatatgccaagtacgccccctattgacgtcaatgacggtaaatggcccgcctggcattatgcccagtacatgaccttatgggactttcctacttggcagtacatctacgtattagtcatcgctattaccatgtcgaggccacgttctgcttcactctccccatctcccccccctccccacccccaattttgtatttatttattttttaattattttgtgcagcgatgggggcggggggggggggcgcgcgccaggcggggcggggcggggcgaggggcggggcggggcgaggcggagaggtgcggcggcagccaatcagagcggcgcgctccgaaagtttccttttatggcgaggcggcggcggcggcggccctataaaaagcgaagcgcgcggcgggcgggagcaagcttcgtttagtgaaccgtcagatcgcctggagacgccatccacgctgttttgacctccatagaagacaccgggaccgatccagcctccgcggattcgaatcccggccgggaacggtgcattggaacgcggattccccgtgccaagagtgacgtaagtaccgcctatagagtctataggcccacaaaaaatgctttcttcttttaatatacttttttgtttatcttatttctaatactttccctaatctctttctttcagggcaataatgatacaatgtatcatgcctctttgcaccattctaaagaataacagtgataatttctgggttaaggcaatagcaatatttctgcatataaatatttctgcatataaattgtaactgatgtaagaggtttcatattgctaatagcagctacaatccagctaccattctgcttttattttatggttgggataaggctggattattctgagtccaagctaggcccttttgctaatcatgttcatacctcttatcttcctcccacagctcctgggcaacgtgctggtctgtgtgctggcccatcactttggcaaagaattgggattcgaaccggtaccggtcgccaccatggcttcagcagcacgcttgacaatgatgtgggaggaggtcacatgccctatctgcctggaccccttcgtggagcctgtgagcatcgagtgtggccacagcttctgccaggaatgcatctctcaggttgggaaaggtgggggcagcgtctgtcctgtgtgccggcagcgctttctgctcaagaatctccggcccaatcgacagctagccaacatggtgaacaaccttaaagaaatcagccaggaggccagagagggcacacagggggaacggtgtgcagtgcatggagagagacttcacctgttctgtgagaaagatgggaaggccctttgctgggtatgtgcccagtctcggaaacaccgtgaccacgccatggtccctcttgaggaggctgcacaggagtaccaggagaagctccaggtggcattaggggaactgagaagaaagcaggagttggctgagaagttggaagtggaaattgcaataaagagagcagactggaagaaaacagtggaaacacagaaatctaggattcacgcagagtttgtgcagcaaaaaaacttcctggttgaagaagaacagaggcagctgcaggagctggagaaggatgagagggagcagctgagaatcctgggggagaaagaggccaagctggcccagcagagccaggccctacaggagctcatctcagagctagatcgaaggtgccacagctcagcactggaactgctgcaggaggtgataattgtcctggaaaggagtgagtcctggaacctgaaggacctggatattacctctccagaactcaggagtgtgtgccatgtgccagggctgaagaagatgctgaggacatgtgcagtccacatcactctggatccagacacagccaatccgtggctgatactttcagaagatcggagacaagtgaggcttggagacacccagcagagcatacctggaaatgaagagagatttgatagttatcctatggtcctgggtgcccagcactttcactctggaaaacattactgggaggtagatgtgacaggaaaggaggcctgggacctgggtgtctgcagagactctgtgcgcaggaaggggcactttttgcttagttccaagagtggcttctggacaatttggttgtggaacaaacaaaaatatgaggctggcacctacccccagactcccctccaccttcaggtgcctccatgccaagttgggattttcctggactatgaggctggcatggtctccttctacaacatcactgaccatggctccctcatctactccttctctgaatgtgcctttacaggacctctgcggcccttcttcagtcctggtttcaatgatggaggaaaaaacacagcccctctaaccctctgtccactgaatattggatcacaaggatccactgactattgatgatgacctgaggatgggtggcatccctgtgacccctccccagtgcctctcctggccctggaagttgccactccagtgcccaccagccttgtcctaataaaattaagttgcatcattttgtctgactaggtgtccttctataatattatggggtggaggggggtggtatggagcaaggggcaagttgggaagacaacctgtagggcctgcggggtctattgggaaccaagctggagtgcagtggcacaatcttggctcactgcaatctccgcctcctgggttcaagcgattctcctgcctcagcctcccgagttgttgggattccaggcatgcatgaccaggctcagctaatttttgtttttttggtagagacggggtttcaccatattggccaggctggtctccaactcctaatctcaggtgatctacccaccttggcctcccaaattgctgggattacaggcgtgaaccactgctcccttccctgtccttggcctaggtatcgatgctacgtagataagtagcatggcgggttaatcattaactacagaggaacccctagtgatggagttggccactccctctctgcgcgctcgctcgctcactgaggccgggcgaccaaaggtcgcccgacgcccgggctttgcccgggcggcctcagtgagcgagcgagcgcgcagctgcctgcagg

SEQ ID NO: 32673 - DNA, 3629 bp, Artificial Sequence
  source: /note="Description of Artificial Sequence: Synthetic polynucleotide"
cctgcaggcagctgcgcgctcgctcgctcactgaggccgcccgggcaaagcccgggcgtcgggcgacctttggtcgcccggcctcagtgagcgagcgagcgcgcagagagggagtggccaactccatcactaggggttccttgtagttaatgattaacccgccatgctacttatctacgtagccatgcgtcgacataacgcgtcgacattgattattgactagttattaatagtaatcaattacggggtcattagttcatagcccatatatggagttccgcgttacataacttacggtaaatggcccgcctggctgaccgcccaacgacccccgcccattgacgtcaataatgacgtatgttcccatagtaacgccaatagggactttccattgacgtcaatgggtggagtatttacggtaaactgcccacttggcagtacatcaagtgtatcatatgccaagtacgccccctattgacgtcaatgacggtaaatggcccgcctggcattatgcccagtacatgaccttatgggactttcctacttggcagtacatctacgtattagtcatcgctattaccatgtcgaggccacgttctgcttcactctccccatctcccccccctccccacccccaattttgtatttatttattttttaattattttgtgcagcgatgggggcggggggggggggcgcgcgccaggcggggcggggcggggcgaggggcggggcggggcgaggcggagaggtgcggcggcagccaatcagagcggcgcgctccgaaagtttccttttatggcgaggcggcggcggcggcggccctataaaaagcgaagcgcgcggcgggcgggagcaagcttcgtttagtgaaccgtcagatcgcctggagacgccatccacgctgttttgacctccatagaagacaccgggaccgatccagcctccgcggattcgaatcccggccgggaacggtgcattggaacgcggattccccgtgccaagagtgacgtaagtaccgcctatagagtctataggcccacaaaaaatgctttcttcttttaatatacttttttgtttatcttatttctaatactttccctaatctctttctttcagggcaataatgatacaatgtatcatgcctctttgcaccattctaaagaataacagtgataatttctgggttaaggcaatagcaatatttctgcatataaatatttctgcatataaattgtaactgatgtaagaggtttcatattgctaatagcagctacaatccagctaccattctgcttttattttatggttgggataaggctggattattctgagtccaagctaggcccttttgctaatcatgttcatacctcttatcttcctcccacagctcctgggcaacgtgctggtctgtgtgctggcccatcactttggcaaagaattgggattcgaaccggtaccggtcgccaccatgtacccatacgatgttccagattacgctggtggatctatggcttcagcagcacgcttgacaatgatgtgggaggaggtcacatgccctatctgcctggaccccttcgtggagcctgtgagcatcgagtgtggccacagcttctgccaggaatgcatctctcaggttgggaaaggtgggggcagcgtctgtcctgtgtgccggcagcgctttctgctcaagaatctccggcccaatcgacagctagccaacatggtgaacaaccttaaagaaatcagccaggaggccagagagggcacacagggggaacggtgtgcagtgcatggagagagacttcacctgttctgtgagaaagatgggaaggccctttgctgggtatgtgcccagtctcggaaacaccgtgaccacgccatggtccctcttgaggaggctgcacaggagtaccaggagaagctccaggtggcattaggggaactgagaagaaagcaggagttggctgagaagttggaagtggaaattgcaataaagagagcagactggaagaaaacagtggaaacacagaaatctaggattcacgcagagtttgtgcagcaaaaaaacttcctggttgaagaagaacagaggcagctgcaggagctggagaaggatgagagggagcagctgagaatcctgggggagaaagaggccaagctggcccagcagagccaggccctacaggagctcatctcagagctagatcgaaggtgccacagctcagcactggaactgctgcaggaggtgataattgtcctggaaaggagtgagtcctggaacctgaaggacctggatattacctctccagaactcaggagtgtgtgccatgtgccagggctgaagaagatgctgaggacatgtgcagtccacatcactctggatccagacacagccaatccgtggctgatactttcagaagatcggagacaagtgaggcttggagacacccagcagagcatacctggaaatgaagagagatttgatagttatcctatggtcctgggtgcccagcactttcactctggaaaacattactgggaggtagatgtgacaggaaaggaggcctgggacctgggtgtctgcagagactctgtgcgcaggaaggggcactttttgcttagttccaagagtggcttctggacaatttggttgtggaacaaacaaaaatatgaggctggcacctacccccagactcccctccaccttcaggtgcctccatgccaagttgggattttcctggactatgaggctggcatggtctccttctacaacatcactgaccatggctccctcatctactccttctctgaatgtgcctttacaggacctctgcggcccttcttcagtcctggtttcaatgatggaggaaaaaacacagcccctctaaccctctgtccactgaatattggatcacaaggatccactgactattgatgatgacctgaggatgggtggcatccctgtgacccctccccagtgcctctcctggccctggaagttgccactccagtgcccaccagccttgtcctaataaaattaagttgcatcattttgtctgactaggtgtccttctataatattatggggtggaggggggtggtatggagcaaggggcaagttgggaagacaacctgtagggcctgcggggtctattgggaaccaagctggagtgcagtggcacaatcttggctcactgcaatctccgcctcctgggttcaagcgattctcctgcctcagcctcccgagttgttgggattccaggcatgcatgaccaggctcagctaatttttgtttttttggtagagacggggtttcaccatattggccaggctggtctccaactcctaatctcaggtgatctacccaccttggcctcccaaattgctgggattacaggcgtgaaccactgctcccttccctgtccttggcctaggtatcgatgctacgtagataagtagcatggcgggttaatcattaactacagaggaacccctagtgatggagttggccactccctctctgcgcgctcgctcgctcactgaggccgggcgaccaaaggtcgcccgacgcccgggctttgcccgggcggcctcagtgagcgagcgagcgcgcagctgcctgcagg

SEQ ID NO: 32674 - DNA, 3638 bp, Artificial Sequence
  source: /note="Description of Artificial Sequence: Synthetic polynucleotide"
cctgcaggcagctgcgcgctcgctcgctcactgaggccgcccgggcaaagcccgggcgtcgggcgacctttggtcgcccggcctcagtgagcgagcgagcgcgcagagagggagtggccaactccatcactaggggttccttgtagttaatgattaacccgccatgctacttatctacgtagccatgcgtcgacataacgcgtcgacattgattattgactagttattaatagtaatcaattacggggtcattagttcatagcccatatatggagttccgcgttacataacttacggtaaatggcccgcctggctgaccgcccaacgacccccgcccattgacgtcaataatgacgtatgttcccatagtaacgccaatagggactttccattgacgtcaatgggtggagtatttacggtaaactgcccacttggcagtacatcaagtgtatcatatgccaagtacgccccctattgacgtcaatgacggtaaatggcccgcctggcattatgcccagtacatgaccttatgggactttcctacttggcagtacatctacgtattagtcatcgctattaccatgtcgaggccacgttctgcttcactctccccatctcccccccctccccacccccaattttgtatttatttattttttaattattttgtgcagcgatgggggcggggggggggggcgcgcgccaggcggggcggggcggggcgaggggcggggcggggcgaggcggagaggtgcggcggcagccaatcagagcggcgcgctccgaaagtttccttttatggcgaggcggcggcggcggcggccctataaaaagcgaagcgcgcggcgggcgggagcaagcttcgtttagtgaaccgtcagatcgcctggagacgccatccacgctgttttgacctccatagaagacaccgggaccgatccagcctccgcggattcgaatcccggccgggaacggtgcattggaacgcggattccccgtgccaagagtgacgtaagtaccgcctatagagtctataggcccacaaaaaatgctttcttcttttaatatacttttttgtttatcttatttctaatactttccctaatctctttctttcagggcaataatgatacaatgtatcatgcctctttgcaccattctaaagaataacagtgataatttctgggttaaggcaatagcaatatttctgcatataaatatttctgcatataaattgtaactgatgtaagaggtttcatattgctaatagcagctacaatccagctaccattctgcttttattttatggttgggataaggctggattattctgagtccaagctaggcccttttgctaatcatgttcatacctcttatcttcctcccacagctcctgggcaacgtgctggtctgtgtgctggcccatcactttggcaaagaattgggattcgaaccggtaccggtcgccaccatgcaccaccaccaccaccacgaaaacctgtacttccagggtggatctatggcttcagcagcacgcttgacaatgatgtgggaggaggtcacatgccctatctgcctggaccccttcgtggagcctgtgagcatcgagtgtggccacagcttctgccaggaatgcatctctcaggttgggaaaggtgggggcagcgtctgtcctgtgtgccggcagcgctttctgctcaagaatctccggcccaatcgacagctagccaacatggtgaacaaccttaaagaaatcagccaggaggccagagagggcacacagggggaacggtgtgcagtgcatggagagagacttcacctgttctgtgagaaagatgggaaggccctttgctgggtatgtgcccagtctcggaaacaccgtgaccacgccatggtccctcttgaggaggctgcacaggagtaccaggagaagctccaggtggcattaggggaactgagaagaaagcaggagttggctgagaagttggaagtggaaattgcaataaagagagcagactggaagaaaacagtggaaacacagaaatctaggattcacgcagagtttgtgcagcaaaaaaacttcctggttgaagaagaacagaggcagctgcaggagctggagaaggatgagagggagcagctgagaatcctgggggagaaagaggccaagctggcccagcagagccaggccctacaggagctcatctcagagctagatcgaaggtgccacagctcagcactggaactgctgcaggaggtgataattgtcctggaaaggagtgagtcctggaacctgaaggacctggatattacctctccagaactcaggagtgtgtgccatgtgccagggctgaagaagatgctgaggacatgtgcagtccacatcactctggatccagacacagccaatccgtggctgatactttcagaagatcggagacaagtgaggcttggagacacccagcagagcatacctggaaatgaagagagatttgatagttatcctatggtcctgggtgcccagcactttcactctggaaaacattactgggaggtagatgtgacaggaaaggaggcctgggacctgggtgtctgcagagactctgtgcgcaggaaggggcactttttgcttagttccaagagtggcttctggacaatttggttgtggaacaaacaaaaatatgaggctggcacctacccccagactcccctccaccttcaggtgcctccatgccaagttgggattttcctggactatgaggctggcatggtctccttctacaacatcactgaccatggctccctcatctactccttctctgaatgtgcctttacaggacctctgcggcccttcttcagtcctggtttcaatgatggaggaaaaaacacagcccctctaaccctctgtccactgaatattggatcacaaggatccactgactattgatgatgacctgaggatgggtggcatccctgtgacccctccccagtgcctctcctggccctggaagttgccactccagtgcccaccagccttgtcctaataaaattaagttgcatcattttgtctgactaggtgtccttctataatattatggggtggaggggggtggtatggagcaaggggcaagttgggaagacaacctgtagggcctgcggggtctattgggaaccaagctggagtgcagtggcacaatcttggctcactgcaatctccgcctcctgggttcaagcgattctcctgcctcagcctcccgagttgttgggattccaggcatgcatgaccaggctcagctaatttttgtttttttggtagagacggggtttcaccatattggccaggctggtctccaactcctaatctcaggtgatctacccaccttggcctcccaaattgctgggattacaggcgtgaaccactgctcccttccctgtccttggcctaggtatcgatgctacgtagataagtagcatggcgggttaatcattaactacagaggaacccctagtgatggagttggccactccctctctgcgcgctcgctcgctcactgaggccgggcgaccaaaggtcgcccgacgcccgggctttgcccgggcggcctcagtgagcgagcgagcgcgcagctgcctgcagg

SEQ ID NO: 32675 - DNA, 4307 bp, Artificial Sequence
  source: /note="Description of Artificial Sequence: Synthetic polynucleotide"
cctgcaggcagctgcgcgctcgctcgctcactgaggccgcccgggcaaagcccgggcgtcgggcgacctttggtcgcccggcctcagtgagcgagcgagcgcgcagagagggagtggccaactccatcactaggggttccttgtagttaatgattaacccgccatgctacttatctacgtagccatgcgtcgacataacgcgtcgacattgattattgactagttattaatagtaatcaattacggggtcattagttcatagcccatatatggagttccgcgttacataacttacggtaaatggcccgcctggctgaccgcccaacgacccccgcccattgacgtcaataatgacgtatgttcccatagtaacgccaatagggactttccattgacgtcaatgggtggagtatttacggtaaactgcccacttggcagtacatcaagtgtatcatatgccaagtacgccccctattgacgtcaatgacggtaaatggcccgcctggcattatgcccagtacatgaccttatgggactttcctacttggcagtacatctacgtattagtcatcgctattaccatgtcgaggccacgttctgcttcactctccccatctcccccccctccccacccccaattttgtatttatttattttttaattattttgtgcagcgatgggggcggggggggggggcgcgcgccaggcggggcggggcggggcgaggggcggggcggggcgaggcggagaggtgcggcggcagccaatcagagcggcgcgctccgaaagtttccttttatggcgaggcggcggcggcggcggccctataaaaagcgaagcgcgcggcgggcgggagcaagcttcgtttagtgaaccgtcagatcgcctggagacgccatccacgctgttttgacctccatagaagacaccgggaccgatccagcctccgcggattcgaatcccggccgggaacggtgcattggaacgcggattccccgtgccaagagtgacgtaagtaccgcctatagagtctataggcccacaaaaaatgctttcttcttttaatatacttttttgtttatcttatttctaatactttccctaatctctttctttcagggcaataatgatacaatgtatcatgcctctttgcaccattctaaagaataacagtgataatttctgggttaaggcaatagcaatatttctgcatataaatatttctgcatataaattgtaactgatgtaagaggtttcatattgctaatagcagctacaatccagctaccattctgcttttattttatggttgggataaggctggattattctgagtccaagctaggcccttttgctaatcatgttcatacctcttatcttcctcccacagctcctgggcaacgtgctggtctgtgtgctggcccatcactttggcaaagaattgggattcgaaccggtgctagcgctaccggtcgccaccatggtgagcaagggcgaggaggataacatggccatcatcaaggagttcatgcgcttcaaggtgcacatggagggctccgtgaacggccacgagttcgagatcgagggcgagggcgagggccgcccctacgagggcacccagaccgccaagctgaaggtgaccaagggtggccccctgcccttcgcctgggacatcctgtcccctcagttcatgtacggctccaaggcctacgtgaagcaccccgccgacatccccgactacttgaagctgtccttccccgagggcttcaagtgggagcgcgtgatgaacttcgaggacggcggcgtggtgaccgtgacccaggactcctccctgcaggacggcgagttcatctacaaggtgaagctgcgcggcaccaacttcccctccgacggccccgtaatgcagaagaagaccatgggctgggaggcctcctccgagcggatgtaccccgaggacggcgccctgaagggcgagatcaagcagaggctgaagctgaaggacggcggccactacgacgctgaggtcaagaccacctacaaggccaagaagcccgtgcagctgcccggcgcctacaacgtcaacatcaagttggacatcacctcccacaacgaggactacaccatcgtggaacagtacgaacgcgccgagggccgccactccaccggcggcatggacgagctgtacaagatggcttcagcagcacgcttgacaatgatgtgggaggaggtcacatgccctatctgcctggaccccttcgtggagcctgtgagcatcgagtgtggccacagcttctgccaggaatgcatctctcaggttgggaaaggtgggggcagcgtctgtcctgtgtgccggcagcgctttctgctcaagaatctccggcccaatcgacagctagccaacatggtgaacaaccttaaagaaatcagccaggaggccagagagggcacacagggggaacggtgtgcagtgcatggagagagacttcacctgttctgtgagaaagatgggaaggccctttgctgggtatgtgcccagtctcggaaacaccgtgaccacgccatggtccctcttgaggaggctgcacaggagtaccaggagaagctccaggtggcattaggggaactgagaagaaagcaggagttggctgagaagttggaagtggaaattgcaataaagagagcagactggaagaaaacagtggaaacacagaaatctaggattcacgcagagtttgtgcagcaaaaaaacttcctggttgaagaagaacagaggcagctgcaggagctggagaaggatgagagggagcagctgagaatcctgggggagaaagaggccaagctggcccagcagagccaggccctacaggagctcatctcagagctagatcgaaggtgccacagctcagcactggaactgctgcaggaggtgataattgtcctggaaaggagtgagtcctggaacctgaaggacctggatattacctctccagaactcaggagtgtgtgccatgtgccagggctgaagaagatgctgaggacatgtgcagtccacatcactctggatccagacacagccaatccgtggctgatactttcagaagatcggagacaagtgaggcttggagacacccagcagagcatacctggaaatgaagagagatttgatagttatcctatggtcctgggtgcccagcactttcactctggaaaacattactgggaggtagatgtgacaggaaaggaggcctgggacctgggtgtctgcagagactctgtgcgcaggaaggggcactttttgcttagttccaagagtggcttctggacaatttggttgtggaacaaacaaaaatatgaggctggcacctacccccagactcccctccaccttcaggtgcctccatgccaagttgggattttcctggactatgaggctggcatggtctccttctacaacatcactgaccatggctccctcatctactccttctctgaatgtgcctttacaggacctctgcggcccttcttcagtcctggtttcaatgatggaggaaaaaacacagcccctctaaccctctgtccactgaatattggatcacaaggatccactgactattgatgatgacctgaggatgggtggcatccctgtgacccctccccagtgcctctcctggccctggaagttgccactccagtgcccaccagccttgtcctaataaaattaagttgcatcattttgtctgactaggtgtccttctataatattatggggtggaggggggtggtatggagcaaggggcaagttgggaagacaacctgtagggcctgcggggtctattgggaaccaagctggagtgcagtggcacaatcttggctcactgcaatctccgcctcctgggttcaagcgattctcctgcctcagcctcccgagttgttgggattccaggcatgcatgaccaggctcagctaatttttgtttttttggtagagacggggtttcaccatattggccaggctggtctccaactcctaatctcaggtgatctacccaccttggcctcccaaattgctgggattacaggcgtgaaccactgctcccttccctgtccttggcctaggtatcgatgctacgtagataagtagcatggcgggttaatcattaactacagaggaacccctagtgatggagttggccactccctctctgcgcgctcgctcgctcactgaggccgggcgaccaaaggtcgcccgacgcccgggctttgcccgggcggcctcagtgagcgagcgagcgcgcagctgcctgcagg

SEQ ID NO: 32676 - DNA, 141 bp, Artificial Sequence
  source: /note="Description of Artificial Sequence: Synthetic polynucleotide"
cctgcaggcagctgcgcgctcgctcgctcactgaggccgcccgggcaaagcccgggcgtcgggcgacctttggtcgcccggcctcagtgagcgagcgagcgcgcagagagggagtggccaactccatcactaggggttcct

SEQ ID NO: 32677 - DNA, 654 bp, Artificial Sequence
  source: /note="Description of Artificial Sequence: Synthetic polynucleotide"
cgacattgattattgactagttattaatagtaatcaattacggggtcattagttcatagcccatatatggagttccgcgttacataacttacggtaaatggcccgcctggctgaccgcccaacgacccccgcccattgacgtcaataatgacgtatgttcccatagtaacgccaatagggactttccattgacgtcaatgggtggagtatttacggtaaactgcccacttggcagtacatcaagtgtatcatatgccaagtacgccccctattgacgtcaatgacggtaaatggcccgcctggcattatgcccagtacatgaccttatgggactttcctacttggcagtacatctacgtattagtcatcgctattaccatgtcgaggccacgttctgcttcactctccccatctcccccccctccccacccccaattttgtatttatttattttttaattattttgtgcagcgatgggggcggggggggggggcgcgcgccaggcggggcggggcggggcgaggggcggggcggggcgaggcggagaggtgcggcggcagccaatcagagcggcgcgctccgaaagtttccttttatggcgaggcggcggcggcggcggccctataaaaagcgaagcgcgcggcgggcgggagc

SEQ ID NO: 32678 - DNA, 134 bp, Artificial Sequence
  source: /note="Description of Artificial Sequence: Synthetic polynucleotide"
tcagatcgcctggagacgccatccacgctgttttgacctccatagaagacaccgggaccgatccagcctccgcggattcgaatcccggccgggaacggtgcattggaacgcggattccccgtgccaagagtgac

SEQ ID NO: 32679 - DNA, 32 bp, Artificial Sequence
  source: /note="Description of Artificial Sequence: Synthetic oligonucleotide"
gtaagtaccgcctatagagtctataggcccac

SEQ ID NO: 32680 - DNA, 347 bp, Artificial Sequence
  source: /note="Description of Artificial Sequence: Synthetic polynucleotide"
aaaaaatgctttcttcttttaatatacttttttgtttatcttatttctaatactttccctaatctctttctttcagggcaataatgatacaatgtatcatgcctctttgcaccattctaaagaataacagtgataatttctgggttaaggcaatagcaatatttctgcatataaatatttctgcatataaattgtaactgatgtaagaggtttcatattgctaatagcagctacaatccagctaccattctgcttttattttatggttgggataaggctggattattctgagtccaagctaggcccttttgctaatcatgttcatacctcttatcttcctcccacag

SEQ ID NO: 32681 - DNA, 53 bp, Artificial Sequence
  source: /note="Description of Artificial Sequence: Synthetic oligonucleotide"
ctcctgggcaacgtgctggtctgtgtgctggcccatcactttggcaaagaatt

SEQ ID NO: 32682 - DNA, 27 bp, Artificial Sequence
  source: /note="Description of Artificial Sequence: Synthetic oligonucleotide"
tacccatacgatgttccagattacgct

SEQ ID NO: 32683 - DNA, 18 bp, Artificial Sequence
  source: /note="Description of Artificial Sequence: Synthetic oligonucleotide"
caccaccaccaccaccac

SEQ ID NO: 32684 - DNA, 21 bp, Artificial Sequence
  source: /note="Description of Artificial Sequence: Synthetic oligonucleotide"
gaaaacctgtacttccagggt

SEQ ID NO: 32685 - DNA, 708 bp, Artificial Sequence
  source: /note="Description of Artificial Sequence: Synthetic polynucleotide"
atggtgagcaagggcgaggaggataacatggccatcatcaaggagttcatgcgcttcaaggtgcacatggagggctccgtgaacggccacgagttcgagatcgagggcgagggcgagggccgcccctacgagggcacccagaccgccaagctgaaggtgaccaagggtggccccctgcccttcgcctgggacatcctgtcccctcagttcatgtacggctccaaggcctacgtgaagcaccccgccgacatccccgactacttgaagctgtccttccccgagggcttcaagtgggagcgcgtgatgaacttcgaggacggcggcgtggtgaccgtgacccaggactcctccctgcaggacggcgagttcatctacaaggtgaagctgcgcggcaccaacttcccctccgacggccccgtaatgcagaagaagaccatgggctgggaggcctcctccgagcggatgtaccccgaggacggcgccctgaagggcgagatcaagcagaggctgaagctgaaggacggcggccactacgacgctgaggtcaagaccacctacaaggccaagaagcccgtgcagctgcccggcgcctacaacgtcaacatcaagttggacatcacctcccacaacgaggactacaccatcgtggaacagtacgaacgcgccgagggccgccactccaccggcggcatggacgagctgtacaag

SEQ ID NO: 32686 - DNA, 1428 bp, Artificial Sequence
  source: /note="Description of Artificial Sequence: Synthetic polynucleotide"
atggcttcagcagcacgcttgacaatgatgtgggaggaggtcacatgccctatctgcctggaccccttcgtggagcctgtgagcatcgagtgtggccacagcttctgccaggaatgcatctctcaggttgggaaaggtgggggcagcgtctgtcctgtgtgccggcagcgctttctgctcaagaatctccggcccaatcgacagctagccaacatggtgaacaaccttaaagaaatcagccaggaggccagagagggcacacagggggaacggtgtgcagtgcatggagagagacttcacctgttctgtgagaaagatgggaaggccctttgctgggtatgtgcccagtctcggaaacaccgtgaccacgccatggtccctcttgaggaggctgcacaggagtaccaggagaagctccaggtggcattaggggaactgagaagaaagcaggagttggctgagaagttggaagtggaaattgcaataaagagagcagactggaagaaaacagtggaaacacagaaatctaggattcacgcagagtttgtgcagcaaaaaaacttcctggttgaagaagaacagaggcagctgcaggagctggagaaggatgagagggagcagctgagaatcctgggggagaaagaggccaagctggcccagcagagccaggccctacaggagctcatctcagagctagatcgaaggtgccacagctcagcactggaactgctgcaggaggtgataattgtcctggaaaggagtgagtcctggaacctgaaggacctggatattacctctccagaactcaggagtgtgtgccatgtgccagggctgaagaagatgctgaggacatgtgcagtccacatcactctggatccagacacagccaatccgtggctgatactttcagaagatcggagacaagtgaggcttggagacacccagcagagcatacctggaaatgaagagagatttgatagttatcctatggtcctgggtgcccagcactttcactctggaaaacattactgggaggtagatgtgacaggaaaggaggcctgggacctgggtgtctgcagagactctgtgcgcaggaaggggcactttttgcttagttccaagagtggcttctggacaatttggttgtggaacaaacaaaaatatgaggctggcacctacccccagactcccctccaccttcaggtgcctccatgccaagttgggattttcctggactatgaggctggcatggtctccttctacaacatcactgaccatggctccctcatctactccttctctgaatgtgcctttacaggacctctgcggcccttcttcagtcctggtttcaatgatggaggaaaaaacacagcccctctaaccctctgtccactgaatattggatcacaaggatccactgactattga

SEQ ID NO: 32687 - DNA, 477 bp, Artificial Sequence
  source: /note="Description of Artificial Sequence: Synthetic polynucleotide"
gggtggcatccctgtgacccctccccagtgcctctcctggccctggaagttgccactccagtgcccaccagccttgtcctaataaaattaagttgcatcattttgtctgactaggtgtccttctataatattatggggtggaggggggtggtatggagcaaggggcaagttgggaagacaacctgtagggcctgcggggtctattgggaaccaagctggagtgcagtggcacaatcttggctcactgcaatctccgcctcctgggttcaagcgattctcctgcctcagcctcccgagttgttgggattccaggcatgcatgaccaggctcagctaatttttgtttttttggtagagacggggtttcaccatattggccaggctggtctccaactcctaatctcaggtgatctacccaccttggcctcccaaattgctgggattacaggcgtgaaccactgctcccttccctgtcctt

SEQ ID NO: 32688 - DNA, 141 bp, Artificial Sequence
  source: /note="Description of Artificial Sequence: Synthetic polynucleotide"
aggaacccctagtgatggagttggccactccctctctgcgcgctcgctcgctcactgaggccgggcgaccaaaggtcgcccgacgcccgggctttgcccgggcggcctcagtgagcgagcgagcgcgcagctgcctgcagg

SEQ ID NO: 32689 - protein, 25 aa, Artificial Sequence
  source: /note="Description of Artificial Sequence: Synthetic peptide"
GGGGSGGGGSGGGGSGGGGSGGGGS

SEQ ID NO: 32690 - protein, 50 aa, Artificial Sequence
  source: /note="Description of Artificial Sequence: Synthetic polypeptide"
  SITE (1)..(50): /note="This sequence may encompass 1-10 'Gly Gly Gly Gly Ser' repeating units"
GGGGSGGGGSGGGGSGGGGSGGGGSGGGGSGGGGSGGGGSGGGGSGGGGS

SEQ ID NO: 32691 - protein, 4 aa, Unknown
  source: /note="Description of Unknown: 'KDEL' motif peptide"
KDEL

SEQ ID NO: 32692 - protein, 4 aa, Artificial Sequence
  source: /note="Description of Artificial Sequence: Synthetic peptide"
LELK

SEQ ID NO: 32693 - protein, 4 aa, Artificial Sequence
  source: /note="Description of Artificial Sequence: Synthetic peptide"
VEIK

SEQ ID NO: 32694 - protein, 9 aa, Artificial Sequence
  source: /note="Description of Artificial Sequence: Synthetic peptide"
GFSASPAFF

SEQ ID NO: 32695 - protein, 25 aa, Artificial Sequence
  source: /note="Description of Artificial Sequence: Synthetic peptide"
GGGGSGGGGSGGGGSGGGGSGGGGS
